(19) United States
(12) Patent Application Publication
(10) Pub. No.: US 2023/0102344 A1
(43) Pub. Date: Mar. 30, 2023

(54) MULTIFUNCTIONAL MOLECULES THAT BIND TO CD33 AND USES THEREOF

(71) Applicant: Marengo Therapeutics, Inc., Cambridge, MA (US)

(72) Inventors: Madan Katragadda, Acton, MA (US); Gurkan Guntas, Newton, MA (US); Peter Marek, Hudson, MA (US); Andreas Loew, Boston, MA (US)

(21) Appl. No.: 17/855,335

(22) Filed: Jun. 30, 2022

Related U.S. Application Data
(63) Continuation of application No. PCT/US2020/067446, filed on Dec. 30, 2020.
(60) Provisional application No. 63/070,788, filed on Aug. 26, 2020.
(60) Provisional application No. 62/956,986, filed on Jan. 3, 2020.

(51) Int. Cl. C07K 16/28; C12N 15/62; C07K 14/55; C07K 14/54; C07K 14/57; A61K 39/395; A61K 45/06; A61P 35/00

(52) U.S. Cl. CPC C07K 16/2803; C12N 15/62; C07K 16/2809; C07K 16/2818; C07K 16/2851; C07K 16/2875; C07K 16/2878; C07K 16/2806; C07K 16/283; C07K 14/55; C07K 14/5418; C07K 14/5434; C07K 14/5443; C07K 14/54; C07K 14/57; A61K 39/3955; A61K 45/06; A61P 35/00; C07K 2319/00; C07K 2317/31; C07K 2317/52

(57) ABSTRACT

Multifunctional molecules that include i) an antigen binding domain that binds to CD33; and one or both of: an immune cell engager (e.g., chosen from a T cell engager, an NK cell engager, a B cell engager, a dendritic cell engager, or a macrophage cell engager) or a cytokine molecule. Additionally disclosed are nucleic acids encoding the same, methods of producing the aforesaid molecules, and methods of treating a cancer using the aforesaid molecules.

### CROSS-REFERENCE TO RELATED APPLICATIONS

[0001] This application is a continuation of International Application No. PCT/US20/67446, filed on Dec. 30, 2020, which claims the benefit of U.S. Provisional Application 62/956,986 filed on Jan. 3, 2020, and U.S. Provisional Application 63/070,788 filed on Aug. 26, 2020, the entire contents of each of which are hereby incorporated by reference.

### SEQUENCE LISTING

[0002] The instant application contains a Sequence Listing which has been submitted electronically in ASCII format and is hereby incorporated by reference in its entirety. Said ASCII copy, created on Feb. 22, 2021, is named 53676_737_301_SL.txt and is 1,580,317 bytes in size.

### BACKGROUND

[0003] CD33 is expressed on many types of cancer cells. For example, CD33 is expressed in approximately 90% of acute myeloid leukemia (AML) cases and on AML stem cells (Dinndorf et al., Blood. 1986; 67(4):1048-1053 and Taussig et al., Blood. 2005; 106(13):4086-4092). Given the ongoing need for improved treatment of CD33-expressing cancers such as AML, new compositions and treatments targeting CD33 are highly desirable.

### SUMMARY OF THE INVENTION

[0004] In some aspects, provided herein is, inter alia, a multifunctional molecule, optionally an isolated multifunctional molecule, comprising:

(i) a first antigen binding domain that binds to CD33, and
(ii) one or both of:
(a) an immune cell engager chosen from a T cell engager, optionally a second antigen binding domain that binds to TCRvβ, optionally as described herein, an NK cell engager, optionally a second antigen binding domain that binds to NKp30, optionally as described herein, a B cell engager, a dendritic cell engager, or a macrophage cell engager; or
(b) a cytokine molecule, optionally an IL-2 molecule, optionally as described herein.

[0005] In some embodiments, the multifunctional molecule as provided herein comprises (i) and (ii)(a).

[0006] In some embodiments, the multifunctional molecule as provided herein comprises (i), (ii)(a), and (ii)(b).

[0007] In some embodiments, the first antigen binding domain comprises:

(i) one, two, or three heavy chain complementarity determining regions (HC CDRs) and/or one, two, or three light chain complementarity determining regions (LC CDRs) of an anti-CD33 antigen binding domain disclosed in Tables 5 and 6, optionally one, two, or three HC CDRs and/or one, two, or three LC CDRs of an anti-CD33 antigen binding domain disclosed in SEQ ID NOs: 267-283;
(ii) a heavy chain variable region (VH) and/or a light chain variable region (VL) of an anti-CD33 antigen binding domain disclosed in Tables 5 and 6, optionally a VH and/or a VL of an anti-CD33 antigen binding domain disclosed in SEQ ID NOs: 267-283, or a sequence with at least 80%, 85%, 90%, 92%, 95%, 97%, 98%, or 99% identity thereto; or
(iii) an anti-CD33 antigen binding domain disclosed in Tables 5 and 6, optionally an anti-CD33 antigen binding domain disclosed in SEQ ID NOs: 267-283, or a sequence with at least 80%, 85%, 90%, 92%, 95%, 97%, 98%, or 99% identity thereto.

[0008] In some embodiments, the multifunctional molecule comprises an immune cell engager chosen from a T cell engager, optionally a second antigen binding domain that binds to TCRvβ, optionally as described herein, an NK cell engager, optionally a second antigen binding domain that binds to NKp30, optionally as described herein, a B cell engager, a dendritic cell engager, or a macrophage cell engager.

[0009] In some embodiments, the immune cell engager binds to and activates an immune cell, optionally an effector cell.

[0010] In some embodiments, the immune cell engager binds to, but does not activate, an immune cell, optionally an effector cell.

[0011] In some embodiments, the immune cell engager is a T cell engager, optionally a T cell engager that mediates binding to and activation of a T cell, or a T cell engager that mediates binding to but not activation of a T cell.

[0012] In some embodiments, the T cell engager binds to TCRVβ, CD3, TCRα, TCRβ, TCRγ, TCRζ, ICOS, CD28, CD27, HVEM, LIGHT, CD40, 4-1BB, OX40, DR3, GITR, CD30, TIM1, SLAM, CD2, or CD226, optionally the T cell engager is an anti-TCRβ antibody molecule.

[0013] In some embodiments, the T cell engager binds to TCRVβ.

[0014] In some embodiments, the T cell engager binds to TCRβ V12 or TCRβ V6, optionally comprising the amino acid sequence of SEQ ID NO: 1044.

[0015] In some embodiments, the T cell engager comprises an anti-TCRVβ antibody molecule, optionally as described herein, optionally comprising one or more amino acid sequences listed in Tables 1A, 2A, 3A, 10A, 11A, 12A, 13A, and 5, or a sequence with at least 80%, 85%, 90%, 92%, 95%, 97%, 98%, or 99% identity thereto, optionally wherein the T cell engager comprises:

(i) one, two, or three heavy chain complementarity determining regions (HC CDRs) and/or one, two, or three light chain complementarity determining regions (LC CDRs) of an anti-TCRvβ antigen binding domain disclosed in Tables 1A, 2A, 3A, 10A, 11A, 12A, 13A, and 5, optionally one, two, or three HC CDRs and/or one, two, or three LC CDRs of an anti-TCRvβ antigen binding domain disclosed in SEQ ID NO: 1326, 1327, 1328, 1329, 1330, 1331, 1332, 1333, 1334, 1335, 1336, 110, 1337, 140, 143, 1343, 1338, 1339, 1340, 1341, 1342, 267, 269, 270, 271, or 272;
(ii) a heavy chain variable region (VH) and/or a light chain variable region (VL) of an anti-TCRvβ antigen binding domain disclosed in Tables 1A, 2A, 3A, 10A, 11A, 12A, 13A, and 5, optionally a VH and/or a VL of an anti-TCRvβ antigen binding domain disclosed in SEQ ID NO: 1326, 1327, 1328, 1329, 1330, 1331, 1332, 1333, 1334, 1335, 1336, 110, 1337, 140, 143, 1343, 1338, 1339, 1340, 1341, 1342, 267, 269, 270, 271, or 272, or a sequence with at least 80%, 85%, 90%, 92%, 95%, 97%, 98%, or 99% identity thereto; or
(iii) an anti-TCRvβ antigen binding domain disclosed in Tables 1A, 2A, 3A, 10A, 11A, 12A, 13A, and 5, optionally an anti-TCRvβ antigen binding domain disclosed in SEQ ID NO: 1326, 1327, 1328, 1329, 1330, 1331, 1332, 1333, 1334, 1335, 1336, 110, 1337, 140, 143, 1343, 1338, 1339, 1340, 1341, 1342, 267, 269, 270, 271, or 272, or a sequence with at least 80%, 85%, 90%, 92%, 95%, 97%, 98%, or 99% identity thereto.

[0016] In some embodiments, the T cell engager comprises:

(a) a heavy chain variable region (VH) and/or a light chain variable region (VL), wherein:
(i) the VH comprises a heavy chain complementarity determining region 1 (VHCDR1) amino acid sequence of SEQ ID NO: 3 or a sequence with no more than 1, 2, 3, or 4 mutations, optionally substitutions, additions, or deletions, a VHCDR2 amino acid sequence of SEQ ID NO: 4 or a sequence with no more than 1, 2, 3, or 4 mutations, optionally substitutions, additions, or deletions, and/or a VHCDR3 amino acid sequence of SEQ ID NO: 5 or a sequence with no more than 1, 2, 3, or 4 mutations, optionally substitutions, additions, or deletions, and/or
(ii) the VL comprises a light chain complementarity determining region 1 (VHCDR1) amino acid sequence of SEQ ID NO: 6 or a sequence with no more than 1, 2, 3, or 4 mutations, optionally substitutions, additions, or deletions, a VHCDR2 amino acid sequence of SEQ ID NO: 7 or a sequence with no more than 1, 2, 3, or 4 mutations, optionally substitutions, additions, or deletions, and/or a VHCDR3 amino acid sequence of SEQ ID NO: 8 or a sequence with no more than 1, 2, 3, or 4 mutations, optionally substitutions, additions, or deletions;
(b) a heavy chain variable region (VH) and/or a light chain variable region (VL), wherein:
(i) the VH comprises a heavy chain complementarity determining region 1 (VHCDR1) amino acid sequence of SEQ ID NO: 255 or a sequence with no more than 1, 2, 3, or 4 mutations, optionally substitutions, additions, or deletions, a VHCDR2 amino acid sequence of SEQ ID NO: 46 or a sequence with no more than 1, 2, 3, or 4 mutations, optionally substitutions, additions, or deletions, and/or a VHCDR3 amino acid sequence of SEQ ID NO: 47 or a sequence with no more than 1, 2, 3, or 4 mutations, optionally substitutions, additions, or deletions, and/or
(ii) the VL comprises a light chain complementarity determining region 1 (VHCDR1) amino acid sequence of SEQ ID NO: 51 or a sequence with no more than 1, 2, 3, or 4 mutations, optionally substitutions, additions, or deletions, a VHCDR2 amino acid sequence of SEQ ID NO: 52 or a sequence with no more than 1, 2, 3, or 4 mutations, optionally substitutions, additions, or deletions, and/or a VHCDR3 amino acid sequence of SEQ ID NO: 53 or a sequence with no more than 1, 2, 3, or 4 mutations, optionally substitutions, additions, or deletions; and/or
(c) a heavy chain variable region (VH) and/or a light chain variable region (VL), wherein:
(i) the VH comprises a heavy chain complementarity determining region 1 (VHCDR1) amino acid sequence of SEQ ID NO: 48 or a sequence with no more than 1, 2, 3, or 4 mutations, optionally substitutions, additions, or deletions, a VHCDR2 amino acid sequence of SEQ ID NO: 49 or a sequence with no more than 1, 2, 3, or 4 mutations, optionally substitutions, additions, or deletions, and/or a VHCDR3 amino acid sequence of SEQ ID NO: 50 or a sequence with no more than 1, 2, 3, or 4 mutations, optionally substitutions, additions, or deletions, and/or
(ii) the VL comprises a light chain complementarity determining region 1 (VHCDR1) amino acid sequence of SEQ ID NO: 54 or a sequence with no more than 1, 2, 3, or 4 mutations, optionally substitutions, additions, or deletions, a VHCDR2 amino acid sequence of SEQ ID NO: 55 or a sequence with no more than 1, 2, 3, or 4 mutations, optionally substitutions, additions, or deletions, and/or a VHCDR3 amino acid sequence of SEQ ID NO: 56 or a sequence with no more than 1, 2, 3, or 4 mutations, optionally substitutions, additions, or deletions.

[0017] In some embodiments, the T cell engager comprises:

(a) a heavy chain variable region (VH) and/or a light chain variable region (VL), wherein:
(i) the VH comprises the amino acid sequence of SEQ ID NO: 9 or an amino acid sequence having at least about 77%, 80%, 85%, 90%, 95%, or 99% sequence identity thereto, and/or
(ii) the VL comprises the amino acid sequence of SEQ ID NO: 10 or an amino acid sequence having at least about 77%, 80%, 85%, 90%, 95%, or 99% sequence identity thereto; and/or
(b) a heavy chain variable region (VH) and/or a light chain variable region (VL), wherein:
(i) the VH comprises the amino acid sequence of SEQ ID NO: 9 or an amino acid sequence having at least about 77%, 80%, 85%, 90%, 95%, or 99% sequence identity thereto, and/or
(ii) the VL comprises the amino acid sequence of SEQ ID NO: 11 or an amino acid sequence having at least about 77%, 80%, 85%, 90%, 95%, or 99% sequence identity thereto.

[0018] In some embodiments, the T cell engager comprises:

(a) a heavy chain variable region (VH) and/or a light chain variable region (VL), wherein:
(i) the VH comprises a heavy chain complementarity determining region 1 (VHCDR1) amino acid sequence of SEQ ID NO: 152 or a sequence with no more than 1, 2, 3, or 4 mutations, optionally substitutions, additions, or deletions, a VHCDR2 amino acid sequence of SEQ ID NO: 226 or a sequence with no more than 1, 2, 3, or 4 mutations, optionally substitutions, additions, or deletions, and/or a VHCDR3 amino acid sequence of SEQ ID NO: 234 or a sequence with no more than 1, 2, 3, or 4 mutations, optionally substitutions, additions, or deletions, and/or
(ii) the VL comprises a light chain complementarity determining region 1 (VHCDR1) amino acid sequence of SEQ ID NO: 235 or a sequence with no more than 1, 2, 3, or 4 mutations, optionally substitutions, additions, or deletions, a VHCDR2 amino acid sequence of SEQ ID NO: 236 or a sequence with no more than 1, 2, 3, or 4 mutations, optionally substitutions, additions, or deletions, and/or a VHCDR3 amino acid sequence of SEQ ID NO: 237 or a sequence with no more than 1, 2, 3, or 4 mutations, optionally substitutions, additions, or deletions;
(b) a heavy chain variable region (VH) and/or a light chain variable region (VL), wherein:
(i) the VH comprises a heavy chain complementarity determining region 1 (VHCDR1) amino acid sequence of SEQ ID NO: 57 or a sequence with no more than 1, 2, 3, or 4 mutations, optionally substitutions, additions, or deletions, a VHCDR2 amino acid sequence of SEQ ID NO: 58 or a sequence with no more than 1, 2, 3, or 4 mutations, optionally substitutions, additions, or deletions, and/or a VHCDR3 amino acid sequence of SEQ ID NO: 59 or a sequence with no more than 1, 2, 3, or 4 mutations, optionally substitutions, additions, or deletions, and/or
(ii) the VL comprises a light chain complementarity determining region 1 (VHCDR1) amino acid sequence of SEQ ID NO: 235 or a sequence with no more than 1, 2, 3, or 4 mutations, optionally substitutions, additions, or deletions, a VHCDR2 amino acid sequence of SEQ ID NO: 64 or a sequence with no more than 1, 2, 3, or 4 mutations, optionally substitutions, additions, or deletions, and/or a VHCDR3 amino acid sequence of SEQ ID NO: 65 or a sequence with no more than 1, 2, 3, or 4 mutations, optionally substitutions, additions, or deletions; and/or
(c) a heavy chain variable region (VH) and/or a light chain variable region (VL), wherein:
(i) the VH comprises a heavy chain complementarity determining region 1 (VHCDR1) amino acid sequence of SEQ ID NO: 60 or a sequence with no more than 1, 2, 3, or 4 mutations, optionally substitutions, additions, or deletions, a VHCDR2 amino acid sequence of SEQ ID NO: 256 or a sequence with no more than 1, 2, 3, or 4 mutations, optionally substitutions, additions, or deletions, and/or a VHCDR3 amino acid sequence of SEQ ID NO: 234 or a sequence with no more than 1, 2, 3, or 4 mutations, optionally substitutions, additions, or deletions, and/or
(ii) the VL comprises a light chain complementarity determining region 1 (VHCDR1) amino acid sequence of SEQ ID NO: 66 or a sequence with no more than 1, 2, 3, or 4 mutations, optionally substitutions, additions, or deletions, a VHCDR2 amino acid sequence of SEQ ID NO: 67 or a sequence with no more than 1, 2, 3, or 4 mutations, optionally substitutions, additions, or deletions, and/or a VHCDR3 amino acid sequence of SEQ ID NO: 68 or a sequence with no more than 1, 2, 3, or 4 mutations, optionally substitutions, additions, or deletions.

[0019] In some embodiments, the T cell engager comprises:

(a) a heavy chain variable region (VH) and/or a light chain variable region (VL), wherein:
(i) the VH comprises the amino acid sequence of SEQ ID NO: 15 or an amino acid sequence having at least about 77%, 80%, 85%, 90%, 95%, or 99% sequence identity thereto, and/or
(ii) the VL comprises the amino acid sequence of SEQ ID NO: 16 or an amino acid sequence having at least about 77%, 80%, 85%, 90%, 95%, or 99% sequence identity thereto; and/or
(b) a heavy chain variable region (VH) and/or a light chain variable region (VL), wherein:
(i) the VH comprises:
the amino acid sequence of SEQ ID NO: 308 or an amino acid sequence having at least about 77%, 80%, 85%, 90%, 95%, or 99% sequence identity thereto, the amino acid sequence of SEQ ID NO: 3438 or an amino acid sequence having at least about 77%, 80%, 85%, 90%, 95%, or 99% sequence identity thereto, or the amino acid sequence of SEQ ID NO: 309 (or an amino acid sequence having at least about 77%, 80%, 85%, 90%, 95%, or 99% sequence identity thereto; and/or
(ii) the VL comprises:
the amino acid sequence of SEQ ID NO: 238 or an amino acid sequence having at least about 77%, 80%, 85%, 90%, 95%, or 99% sequence identity thereto,
the amino acid sequence of SEQ ID NO: 239 or an amino acid sequence having at least about 77%, 80%, 85%, 90%, 95%, or 99% sequence identity thereto,
the amino acid sequence of SEQ ID NO: 240 or an amino acid sequence having at least about 77%, 80%, 85%, 90%, 95%, or 99% sequence identity thereto,
the amino acid sequence of SEQ ID NO: 241 or an amino acid sequence having at least about 77%, 80%, 85%, 90%, 95%, or 99% sequence identity thereto, or
the amino acid sequence of SEQ ID NO: 242 or an amino acid sequence having at least about 77%, 80%, 85%, 90%, 95%, or 99% sequence identity thereto.

[0020] In some embodiments, the immune cell engager is an NK cell engager, optionally an NK cell engager that mediates binding to and activation of an NK cell, or an NK cell engager that mediates binding to but not activation of an NK cell.

[0021] In some embodiments, the NK cell engager binds to, optionally activates: NKp30, NKp40, NKp44, NKp46, NKG2D, DNAM1, DAP10, CD16, optionally CD16a, CD16b, or both, CRTAM, CD27, PSGL1, CD96, CD100 (SEMA4D), NKp80, CD244 (also known as SLAMF4 or 2B4), SLAMF6, SLAMF7, KIR2DS2, KIR2DS4, KIR3DS1, KIR2DS3, KIR2DS5, KIR2DS1, CD94, NKG2C, NKG2E, or CD160, optionally the NK cell engager binds to, optionally activates, NKp30.

[0022] In some embodiments, the NK cell engager binds to NKp30.

[0023] In some embodiments, the NK cell engager comprises an anti-NKp30 antibody molecule, optionally as described herein, optionally comprising one or more amino acid sequences listed in Tables 6, 7, 8, 8A, 8B, 9, 10, and 18, or a sequence with at least 80%, 85%, 90%, 92%, 95%, 97%, 98%, or 99% identity thereto, optionally wherein the NK cell engager comprises:

(i) one, two, or three heavy chain complementarity determining regions (HC CDRs) and/or one, two, or three light chain complementarity determining regions (LC CDRs) of an anti-NKp30 antigen binding domain disclosed in Tables 6, 7, 8, 8A, 8B, 9, 10, and 18, optionally one, two, or three HC CDRs and/or one, two, or three LC CDRs of an anti-NKp30 antigen binding domain disclosed in SEQ ID NO: 6121-6153, 6187-6190, 275, 275, 275, 278, 281, 282, or 283;
(ii) a heavy chain variable region (VH) and/or a light chain variable region (VL) of an anti-NKp30 antigen binding domain disclosed in Tables 6, 7, 8, 8A, 8B, 9, 10, and 18, optionally a VH and/or a VL of an anti-NKp30 antigen binding domain disclosed in SEQ ID NO: 6121-6153, 6187-6190, 275, 275, 275, 278, 281, 282, or 283, or a sequence with at least 80%, 85%, 90%, 92%, 95%, 97%, 98%, or 99% identity thereto; or
(iii) an anti-NKp30 antigen binding domain disclosed in Tables 6, 7, 8, 8A, 8B, 9, 10, and 18, optionally an anti-NKp30 antigen binding domain disclosed in SEQ ID NO: 6121-6153, 6187-6190, 275, 275, 275, 278, 281, 282, or 283, or a sequence with at least 80%, 85%, 90%, 92%, 95%, 97%, 98%, or 99% identity thereto, optionally wherein the NK cell engager comprises:
(a) an anti-NKp30 antigen binding domain comprising a VH CDR1, VH CDR2, VH CDR3, VL CDR1, VL CDR2, and VL CDR3 comprising the amino acid sequences of SEQ ID NOs: 284, 6001, 7315, 7326, 7327, and 7329, respectively;
(b) an anti-NKp30 antigen binding domain comprising a VH comprising the amino acid sequence of SEQ ID NO: 7302 or a sequence with at least 80%, 85%, 90%, 92%, 95%, 97%, 98%, or 99% identity thereto and/or a VL comprising the amino acid sequence of SEQ ID NO: 7309 or a sequence with at least 80%, 85%, 90%, 92%, 95%, 97%, 98%, or 99% identity thereto; and/or
(c) an anti-NKp30 antigen binding domain comprising the amino acid sequence of SEQ ID NO: 7311 or a sequence with at least 80%, 85%, 90%, 92%, 95%, 97%, 98%, or 99% identity thereto.

[0024] In some embodiments, the multifunctional molecule comprises a cytokine molecule, optionally an IL-2 molecule, optionally as described herein.

[0025] In some embodiments, the cytokine molecule is an IL-2 molecule comprising an IL-2 sequence disclosed in Tables 5 and 6, or a sequence with at least 80%, 85%, 90%, 92%, 95%, 97%, 98%, or 99% identity thereto, optionally wherein the IL-2 molecule comprises a F42A substitution and/or a Y45A substitution.

[0026] In some embodiments, the multifunctional molecule as provided herein comprises:

(i) one antigen binding domain that binds to CD33 and one immune cell engager, optionally one antigen binding domain that binds to TCRvβ or NKp30;
(ii) one antigen binding domain that binds to CD33 and two immune cell engagers, optionally two antigen binding domains that bind to TCRvβ or NKp30;
(iii) two antigen binding domains that bind to CD33 and one immune cell engager, optionally one antigen binding domain that binds to TCRvβ or NKp30; or
(iv) two antigen binding domains that bind to CD33 and two immune cell engagers, optionally two antigen binding domains that bind to TCRvβ or NKp30, optionally wherein:
the multifunctional molecule further comprises one or two cytokine molecules, optionally one or two IL-2 molecules.

[0027] In some embodiments:

(i) the antigen binding domain that binds to CD33 comprises a Fab region comprising a VH and a VL; and
(ii) the antigen binding domain that binds to TCRvβ or NKp30 comprises a scFv region, optionally a scFv region that is linked to the VH or VL of the antigen binding domain that binds to CD33, optionally a scFv region that is linked to the VH, optionally the N-terminus of the VH, of the antigen binding domain that binds to CD33.

[0028] In some embodiments, the multifunctional molecule as provided herein comprises a first chain comprising a VH of the antigen binding domain that binds to CD33 fused to a heavy chain constant region, optionally CH1, CH2, and CH3, a second chain comprising a VL of the antigen binding domain that binds to CD33 fused to a light chain constant region, and a third chain comprising the antigen binding domain that binds to TCRvβ or NKp30, optionally a scFv region that binds to TCRvβ or NKp30, fused to a heavy chain constant region, optionally CH2 and CH3, optionally wherein:

(i) the first chain further comprises an IL-2 molecule, optionally at the C-terminus of the heavy chain constant region, optionally CH3; (ii) the second chain further comprises an IL-2 molecule, optionally at the C-terminus of the light chain constant region;
(iii) the third chain further comprises an IL-2 molecule, optionally at the N-terminus of the antigen binding domain that binds to TCRvβ or NKp30, optionally the scFv that binds to TCRvβ or NKp30;
(iv) the third chain further comprises an IL-2 molecule, optionally between the antigen binding domain that binds to TCRvβ or NKp30, optionally a scFv region that binds to TCRvβ or NKp30, and the heavy chain constant region, optionally CH2; and/or
(v) the third chain further comprises an IL-2 molecule, optionally at the C-terminus of the heavy chain constant region, optionally CH3.

[0029] In some embodiments, the multifunctional molecule as provided herein comprises an antigen binding domain that binds to CD33 and an antigen binding domain that binds to TCRvβ, optionally wherein the multifunctional molecule comprises an amino acid sequence disclosed in Table 5, or a sequence with at least 80%, 85%, 90%, 92%, 95%, 97%, 98%, or 99% identity thereto, optionally wherein the multifunctional molecule comprises:

(i) SEQ ID NO: 267 or a sequence with at least 80%, 85%, 90%, 92%, 95%, 97%, 98%, or 99% identity thereto, and/or SEQ ID NO: 268 or a sequence with at least 80%, 85%, 90%, 92%, 95%, 97%, 98%, or 99% identity thereto;
(ii) SEQ ID NO: 269 or a sequence with at least 80%, 85%, 90%, 92%, 95%, 97%, 98%, or 99% identity thereto, and/or SEQ ID NO: 268 or a sequence with at least 80%, 85%, 90%, 92%, 95%, 97%, 98%, or 99% identity thereto;
(iii) SEQ ID NO: 270 or a sequence with at least 80%, 85%, 90%, 92%, 95%, 97%, 98%, or 99% identity thereto, and/or SEQ ID NO: 268 or a sequence with at least 80%, 85%, 90%, 92%, 95%, 97%, 98%, or 99% identity thereto;
(iv) SEQ ID NO: 271 or a sequence with at least 80%, 85%, 90%, 92%, 95%, 97%, 98%, or 99% identity thereto, and/or SEQ ID NO: 268 or a sequence with at least 80%, 85%, 90%, 92%, 95%, 97%, 98%, or 99% identity thereto; or
(v) SEQ ID NO: 272 or a sequence with at least 80%, 85%, 90%, 92%, 95%, 97%, 98%, or 99% identity thereto, and/or SEQ ID NO: 268 or a sequence with at least 80%, 85%, 90%, 92%, 95%, 97%, 98%, or 99% identity thereto.

[0030] In some embodiments, the multifunctional molecule as provided herein comprises an antigen binding domain that binds to CD33, an antigen binding domain that binds to TCRvβ, and an IL-2 molecule, optionally wherein the multifunctional molecule comprises an amino acid sequence disclosed in Table 5, or a sequence with at least 80%, 85%, 90%, 92%, 95%, 97%, 98%, or 99% identity thereto, optionally wherein the multifunctional molecule comprises SEQ ID NO: 271 or a sequence with at least 80%, 85%, 90%, 92%, 95%, 97%, 98%, or 99% identity thereto, and/or SEQ ID NO: 273 or a sequence with at least 80%, 85%, 90%, 92%, 95%, 97%, 98%, or 99% identity thereto.

[0031] In some embodiments, the multifunctional molecule as provided herein comprises an antigen binding domain that binds to CD33 and an antigen binding domain that binds to NKp30, optionally wherein the multifunctional molecule comprises an amino acid sequence disclosed in Table 6, or a sequence with at least 80%, 85%, 90%, 92%, 95%, 97%, 98%, or 99% identity thereto, optionally wherein the multifunctional molecule comprises:

(i) SEQ ID NO: 274 or a sequence with at least 80%, 85%, 90%, 92%, 95%, 97%, 98%, or 99% identity thereto, SEQ ID NO: 268 or a sequence with at least 80%, 85%, 90%, 92%, 95%, 97%, 98%, or 99% identity thereto, and/or SEQ ID NO: 275 or a sequence with at least 80%, 85%, 90%, 92%, 95%, 97%, 98%, or 99% identity thereto; or
(ii) SEQ ID NO: 277 or a sequence with at least 80%, 85%, 90%, 92%, 95%, 97%, 98%, or 99% identity thereto, SEQ ID NO: 268 or a sequence with at least 80%, 85%, 90%, 92%, 95%, 97%, 98%, or 99% identity thereto, and/or SEQ ID NO: 278 or a sequence with at least 80%, 85%, 90%, 92%, 95%, 97%, 98%, or 99% identity thereto.

[0032] In some embodiments, the multifunctional molecule as provided herein comprises an antigen binding domain that binds to CD33, an antigen binding domain that binds to NKp30, and an IL-2 molecule, optionally wherein the multifunctional molecule comprises an amino acid sequence disclosed in Table 6, or a sequence with at least 80%, 85%, 90%, 92%, 95%, 97%, 98%, or 99% identity thereto, optionally wherein the multifunctional molecule comprises:

(i) SEQ ID NO: 274 or a sequence with at least 80%, 85%, 90%, 92%, 95%, 97%, 98%, or 99% identity thereto, SEQ ID NO: 273 or a sequence with at least 80%, 85%, 90%, 92%, 95%, 97%, 98%, or 99% identity thereto, and/or SEQ ID NO: 275 or a sequence with at least 80%, 85%, 90%, 92%, 95%, 97%, 98%, or 99% identity thereto;
(ii) SEQ ID NO: 274 or a sequence with at least 80%, 85%, 90%, 92%, 95%, 97%, 98%, or 99% identity thereto, SEQ ID NO: 276 or a sequence with at least 80%, 85%, 90%, 92%, 95%, 97%, 98%, or 99% identity thereto, and/or SEQ ID NO: 275 or a sequence with at least 80%, 85%, 90%, 92%, 95%, 97%, 98%, or 99% identity thereto;
(iii) SEQ ID NO: 279 or a sequence with at least 80%, 85%, 90%, 92%, 95%, 97%, 98%, or 99% identity thereto, SEQ ID NO: 280 or a sequence with at least 80%, 85%, 90%, 92%, 95%, 97%, 98%, or 99% identity thereto, and/or SEQ ID NO: 281 or a sequence with at least 80%, 85%, 90%, 92%, 95%, 97%, 98%, or 99% identity thereto;
(iv) SEQ ID NO: 279 or a sequence with at least 80%, 85%, 90%, 92%, 95%, 97%, 98%, or 99% identity thereto, SEQ ID NO: 280 or a sequence with at least 80%, 85%, 90%, 92%, 95%, 97%, 98%, or 99% identity thereto, and/or SEQ ID NO: 282 or a sequence with at least 80%, 85%, 90%, 92%, 95%, 97%, 98%, or 99% identity thereto; or
(v) SEQ ID NO: 279 or a sequence with at least 80%, 85%, 90%, 92%, 95%, 97%, 98%, or 99% identity thereto, SEQ ID NO: 280 or a sequence with at least 80%, 85%, 90%, 92%, 95%, 97%, 98%, or 99% identity thereto, and/or SEQ ID NO: 283 or a sequence with at least 80%, 85%, 90%, 92%, 95%, 97%, 98%, or 99% identity thereto.

[0033] In some embodiments, the multifunctional molecule as provided herein comprises one or more immunoglobulin chain constant regions, optionally Fc regions, comprising one or more of: a paired cavity-protuberance (“knob-in-a hole”), an electrostatic interaction, or a strand-exchange.

[0034] In some embodiments, the multifunctional molecule as provided herein comprises one or more immunoglobulin chain constant regions, optionally Fc regions, comprising an amino acid substitution at a position chosen from one or more of 347, 349, 350, 351, 366, 368, 370, 392, 394, 395, 397, 398, 399, 405, 407, or 409, optionally of the Fc region of human IgG1, optionally wherein the one or more immunoglobulin chain constant regions, optionally Fc regions, comprise an amino acid substitution chosen from: T366S, L368A, or Y407V, optionally corresponding to a cavity or hole, or T366W, optionally corresponding to a protuberance or knob, or a combination thereof.

[0035] In some embodiments, the multifunctional molecule as provided herein comprises one or more immunoglobulin chain constant regions, optionally Fc regions, that has reduced effector function, optionally reduced ADCC, ADCP and/or CDC, reduced binding to one or more Fc receptors, and/or reduced binding to C1q complement, compared to a wildtype immunoglobulin chain constant region, optionally a wildtype Fc region.

[0036] In some embodiments, the multifunctional molecule as provided herein comprises one or more immunoglobulin chain constant regions, optionally Fc regions, comprising a modification or mutation disclosed in Table 21A, optionally an Asn297Ala (N297A) mutation or a Leu234Ala/Leu235Ala (LALA) mutation.

[0037] In some embodiments, the multifunctional molecule as provided herein further comprises a linker, optionally a linker between one or more of: the antigen binding domain that binds to CD33, the immune cell engager, the cytokine molecule, a heavy chain constant region, and a light chain constant region, optionally wherein the linker is chosen from: a cleavable linker, a non-cleavable linker, a peptide linker, a flexible linker, a rigid linker, a helical linker, or a non-helical linker, optionally wherein the linker is a peptide linker, optionally a peptide linker comprising Gly and Ser, optionally a peptide linker comprising an amino acid sequence chosen from SEQ ID NOs: 42-45 or 75-78.

[0038] In some embodiments, the multifunctional molecule as provided herein further comprises a modulator of a cytokine molecule, optionally a TGF-β inhibitor, optionally as described herein.

[0039] In some embodiments, the multifunctional molecule as provided herein further comprises a stromal modifying moiety, optionally as described herein.

[0040] In another aspect, provided herein is a nucleic acid molecule encoding the multifunctional molecule as provided herein.

[0041] In another aspect, provided herein is a vector, optionally an expression vector, comprising the nucleic acid molecule as provided herein.

[0042] In another aspect, provided herein is a cell comprising the nucleic acid molecule as provided herein or the vector as provided herein.

[0043] In another aspect, provided herein is a method of making, optionally producing, the multifunctional molecule as provided herein, comprising culturing the cell as provided herein, under suitable conditions, optionally conditions suitable for gene expression and/or homo- or heterodimerization.

[0044] In another aspect, provided herein is a pharmaceutical composition comprising the multifunctional molecule as provided herein, and a pharmaceutically acceptable carrier, excipient, or stabilizer.

[0045] In another aspect, provided herein is a method of treating a cancer, comprising administering to a subject in need thereof the multifunctional molecule as provided herein, wherein the multifunctional molecule is administered in an amount effective to treat the cancer.

[0046] In some embodiments, the subject has cancer cells that express CD33.

[0047] In some embodiments, the cancer is a hematological cancer.

[0048] In some embodiments, the cancer is a myeloid leukemia chosen from: acute myeloblastic leukemia, acute myelomonocytic leukemia, juvenile myelomonocytic leukemia, chronic myelomonocytic leukemia, acute basophilic leukemia, acute eosinophilic leukemia, chronic eosinophilic leukemia, acute biphenotypic leukaemia, acute megakaryoblastic leukemia, acute erythroid leukemia, acute panmyeloic leukemia, chronic neutrophilic leukemia, myeloid dendritic cell leukemia, accelerated phase chronic myelogenous leukemia, essential thrombocytosis, polycythemia vera, myelodysplastic syndrome, or myeloid sarcoma.

[0049] In some embodiments, the method as provided herein further comprises administering a second therapeutic treatment, optionally a second therapeutic treatment comprising a therapeutic agent, optionally a chemotherapeutic agent, a biologic agent, hormonal therapy, radiation, or surgery.

### BRIEF DESCRIPTION OF THE DRAWINGS

[0050] The patent or application file contains at least one drawing executed in color. Copies of this patent or patent application publication with color drawing(s) will be provided by the Office upon request and payment of the necessary fee.

[0051] FIGS. 1A-1B shows the alignment of the Antibody A source mouse VH and VL framework 1, CDR 1, framework 2, CDR 2, framework 3, CDR3, and framework 4 regions with their respective humanized sequences. Kabat CDRs are shown in bold, Chothia CDRs are shown in italics, and combined CDRs are shown in boxes. The framework positions that were back mutated are double underlined. FIG. 1A shows VH sequences for murine Antibody A (SEQ ID NO: 1) and humanized Antibody A-H (SEQ ID NO: 9). FIG. 1B shows VL sequences for murine Antibody A (SEQ ID NO: 2) and humanized Antibody A-H (SEQ ID NO: 10 and SEQ ID NO: 11).

[0052] FIGS. 2A-2B shows the alignment of the Antibody B source mouse VH and VL framework 1, CDR 1, framework 2, CDR 2, framework 3, CDR3, and framework 4 regions with their respective humanized sequences. Kabat CDRs are shown in bold, Chothia CDRs are shown in italics, and combined CDRs are shown in boxes. The framework positions that were back mutated are double underlined. FIG. 2A shows the VH sequence for murine Antibody B (SEQ ID NO: 15) and humanized VH sequences B-H.1A to B-H.1C (SEQ ID NOs: 308, 3438, and 309, respectively, in order of appearance). FIG. 2B shows the VL sequence for murine Antibody B (SEQ ID NO: 16) and humanized VL sequences B-H.1D to B-H.1H (SEQ ID NOs: 238-242).

[0053] FIG. 3 depicts the phylogenetic tree of TCRBV gene family and subfamilies with corresponding antibodies mapped. Subfamily identities are as follows: Subfamily A: TCRβ V6; Subfamily B: TCRβ V10; Subfamily C: TCRβ V12; Subfamily D: TCRβ V5; Subfamily E: TCRβ V7; Subfamily F: TCRβ V11; Subfamily G: TCRβ V14; Subfamily H: TCRβ V16; Subfamily I:TCRβ V18; Subfamily J:TCRβ V9; Subfamily K: TCRβ V13; Subfamily L: TCRβ V4; Subfamily M:TCRβ V3; Subfamily N:TCRβ V2; Subfamily O:TCRβ V15; Subfamily P: TCRβ V30; Subfamily Q: TCRβ V19; Subfamily R:TCRβ V27; Subfamily S:TCRβ V28; Subfamily T: TCRβ V24; Subfamily U: TCRβ V20; Subfamily V: TCRβ V25; and Subfamily W:TCRβ V29 subfamily. Subfamily members are described in detail herein in the Section titled “TCR beta V (TCRβV)”.

[0054] FIGS. 4A-4C show human CD3+ T cells activated by anti-TCR Vβ13.1 antibody (A-H.1) for 6-days. Human CD3+ T cells were isolated using magnetic-bead separation (negative selection) and activated with immobilized (plate-coated) anti-TCR Vβ13.1 (A-H.1) or anti-CD3ϵ (OKT3) antibodies at 100 nM for 6 days. FIG. 4A shows two scatter plots (left: activated with OKT3; and right: activated with A-H.1) of expanded T cells assessed for TCR Vβ13.1 surface expression using anti-TCR Vβ13.1 (A-H.1) followed by a secondary fluorochrome-conjugated antibody for flow cytometry analysis. FIG. 4B shows percentage (%) of TCR Vβ13.1 positive T cells activated by anti-TCR Vβ13.1 (A-H.1) or anti-CD3e (OKT3) plotted against total T cells (CD3+). FIG. 4C shows relative cell count acquired by counting the number of events in each T cell subset gate (CD3 or TCR Vβ13.1) for 20 seconds at a constant rate of 60 μl/min. Data shown as mean value from 3 donors.

[0055] FIGS. 5A-5B show cytolytic activity of human CD3+ T cells activated by anti-TCR Vβ13.1 antibody (A-H.1) against transformed cell line RPMI 8226. FIG. 5A depicts target cell lysis of human CD3+ T cells activated with A-H.1 or OKT3. Human CD3+ T cells were isolated using magnetic-bead separation (negative selection) and activated with immobilized (plate-coated) A-H.1 or OKT3 at the indicated concentrations for 4 days prior to co-culture with RPMI 8226 cells at a (E:T) ratio of 5:1 for 2 days. Samples were next analyzed for cell lysis of RPMI 8226 cells by FACS staining for CFSE/CD138-labeled, and membrane-impermeable DNA dyes (DRAQ7) using flow cytometry analysis. FIG. 5B shows target cell lysis of human CD3+ T cells activated with A-H.1 or OKT3 incubated with RPMI-8226 at a (E:T) ratio of 5:1 for 6 days followed by cell lysis analysis of RPMI 8226 cells as described above. Percentage (%) target cell lysis was determined by normalizing to basal target cell lysis (i.e. without antibody treatment) using the following formula, [(x−basal)/(100%−basal), where x is cell lysis of sample]. Data shown is a representative of n=1 donor.

[0056] FIGS. 6A-6B show IFNg production by human PBMCs activated with the indicated antibodies. Human PBMCs were isolated from whole blood from the indicated number of donors, followed by solid-phase (plate-coated) stimulation with the indicated antibodies at 100 Nm. Supernatant was collected on Days 1, 2, 3, 5, or 6. FIG. 6A is a graph comparing the production of IFNg in human PBMCs activated with the antibodies indicated activated with anti-TCR Vβ13.1 antibodies (A-H.1 or A-H.2) or anti-CD3e antibodies (OKT3 or SP34-2) on Day 1, 2, 3, 5, or 6 post-activation. FIG. 6B shows IFNg production in human PBMCs activated with the antibodies indicated activated with the indicated anti-TCR Vβ13.1 antibodies or anti-CD3e antibody (OKT3) on Day 1, 2, 3, 5, or 6 post-activation.

[0057] FIGS. 7A-7B show IL-2 production by human PBMCs activated with the indicated antibodies. A similar experimental setup as described for FIGS. 6A-6B was used.

[0058] FIGS. 8A-8B show IL-6 production by human PBMCs activated with the indicated antibodies. A similar experimental setup as described for FIGS. 6A-6B was used.

[0059] FIGS. 9A-9B show TNF-alpha production by human PBMCs activated with the indicated antibodies. A similar experimental setup as described for FIGS. 6A-6B was used.

[0060] FIGS. 10A-10B show IL-1beta production by human PBMCs activated with the indicated antibodies. A similar experimental setup as described for FIGS. 6A-6B was used.

[0061] FIGS. 11A-11B are graphs showing delayed kinetics of IFNg secretion in human PMBCs activated by anti-TCR Vβ13.1 antibody A-H.1 when compared to PBMCs activated by anti-CD3e antibody OKT3.

[0062] FIG. 11A shows IFNg secretion data from 4 donors. FIG. 11B shows IFNg secretion data from 4 additional donors. Data shown is representative of n=8 donors.

[0063] FIG. 12 depicts increased CD8+ TSCM and Temra T cell subsets in human PBMCs activated by anti-TCR Vβ13.1 antibodies (A-H.1 or A-H.2) compared to PBMCs activated by anti-CD3e antibodies (OKT3 or SP34-2).

[0064] FIGS. 13A-13B are graphs showing the binding of the indicated antibodies to TCRvβ6-5+ Jurkat cells (FIG. 13A) or CD33+MOLM-13 cells (FIG. 13B). The antibodies tested include the anti-CD33×TCRvβ antibodies BJM0387, BJM0902, BJM0906, BJM0909, and BJM0923. The anti-TCRvβ antibody BHM1709 and the anti-CD33 antibody BJM0390 were used as controls. Also shown in FIG. 13A are EC50s of the indicated antibodies to TCRv R6-5+ Jurkat cells.

[0065] FIG. 14 is a table showing the configurations of the indicated anti-CD33×TCRvβ antibodies or anti-CD33×CD3 antibodies, and their EC50s to cells expressing CD3, TCRvβ, or CD33. The antibodies tested include the anti-CD33×TCRvβ antibodies BJM0387, BJM0902, BJM0906, BJM0909, and BJM0923, and BJM0813 as well as the anti-CD33×CD3 antibodies BJM0886, BJM0751, and BJM0815.

[0066] FIG. 15A is a panel of flow cytometry plots showing staining of TCRvβ6-5 expanded T cells indicating greater than 85% purity. FIGS. 15B and 15C are graphs showing % target cell lysis against MV411 cells (FIG. 15B) or HL60 cells (FIG. 15C). BJM0387 is a bispecific antibody that binds to CD33 and TCRvβ. The anti-CD33×CD3 antibody BJM0395 was used as a positive control. The anti-RSV×TCRvβ antibody BJM0784 was used as a negative control.

[0067] FIGS. 16A-16B are graphs showing in vivo assessment of CD33×TCRvβ and CD33×TCRvβ×IL2 in hPBMC engrafted Molm13 Luc model. FIG. 16A: Tumor burden as assessed by BLI was decreased with both CD33×TCRvβ and CD33×TCRvβ×IL2 treatments in hPBMC engrafted Molm13 Luc model. FIG. 16B: Statistically significant tumor growth inhibition noted with both CD33×TCRvβ and CD33×TCRvβ×IL2 molecules in hPBMC engrafted Molm13 Luc model.

[0068] FIGS. 17A-17B are graphs showing in vivo assessment of CD33×TCRvβ molecule in expanded TCRvβ T cell engrafted Molm13-Luc model. FIG. 17A: Tumor burden reduction noted with CD33×TCRvβ treatments (0.5 and 2 mg/kg) in TCRvβ T cell engrafted Molm13-Luc model. FIG. 17B: Statistically significant tumor growth inhibition noted with CD33×TCRvβ at both 0.5 mg/kg and 2 mg/kg doses in expanded TCRvβ T cell engrafted Molm13 Luc model.

[0069] FIGS. 18A-18B are graphs showing that CD33×NKp30 molecules induce strong lysis of HL60 myeloma cells (FIG. 18A) and activation of NK cells (FIG. 18B). In FIG. 18A, % Specific lysis is plotted over antibody concentrations. In FIG. 18B, % CD107+CD69+NK cells is plotted over antibody concentrations. CD33 antibody and hIgG1 were used as negative controls. Combined data from two donors are shown. An effector-to-target ratio of 5:1 was used.

[0070] FIGS. 19A-19B are graphs showing data from assays similar to the ones shown in FIGS. 18A and 18B. Different effector to target ratios were tested at 20 nM antibody concentration.

[0071] FIGS. 20A-20C are graphs showing NK-cell-mediated lysis of HL-60 target cells in the presence of the indicated antibodies. The antibodies tested include CD33×NKp30 molecules (BJM1017 and BJM1018) as well as CD33×NKp30×IL2 molecules (BJM1019 and BJM1020). The anti-CD33 antibody BJM0390 and the anti-NKp30 antibodies BJM0859 and BJM0860 were used as controls. EC50s are also shown in each figure. FIG. 20A, Donor 222; FIG. 20B, Donor 355; FIG. 20B, Combined donor data.

[0072] FIG. 21 is a graph showing specific lysis of MOLM-13 target cells by primary NK cells in the presence of the indicated antibodies. The antibodies tested include CD33×NKp30 molecules (BJM1017 and BJM1018) as well as CD33×NKp30×IL2 molecules (BJM1019 and BJM1020). The anti-CD33 antibody BJM0390 and the anti-NKp30 antibodies BJM0859 and BJM0860 were used as controls. EC50s are also shown.

[0073] FIG. 22 is a graph showing specific lysis of HL-60 cells by NK92 cells in the presence of the indicated antibodies. The antibodies tested include CD33×NKp30 molecules (BJM1017 and BJM1018) as well as CD33×NKp30×IL2 molecules (BJM1019 and BJM1020). The anti-CD33 antibody BJM0390 and the anti-NKp30 antibodies BJM0859 and BJM0860 were used as controls. EC50s are also shown.

[0074] FIGS. 23A and 23B show the alignment of affinity matured humanized Antibody A-H VL and A-H VH sequences. FIG. 23A shows the alignment of affinity matured humanized Antibody A-H VL sequences (SEQ ID NOS: 3377-3389, respectively, in order of appearance), and consensus VL sequence SEQ ID NO: 259, and consensus VL sequence SEQ ID NO: 3289. FIG. 23B shows the alignment of affinity matured humanized Antibody A-H VH sequences (SEQ ID NOS: 3390-3436, respectively, in order of appearance), and consensus VH sequence SEQ ID NO: 260 and consensus VH sequence SEQ ID NO: 3290.

### DETAILED DESCRIPTION OF THE INVENTION

[0075] Disclosed herein are multifunctional molecules (also referred to herein as “multispecific molecules”) that include a plurality of (e.g., two or more) functionalities (or binding specificities), comprising (i) an antigen binding domain that binds to CD33, and (ii) one or both of: (a) an immune cell engager chosen from a T cell engager, an NK cell engager, a B cell engager, a dendritic cell engager, or a macrophage cell engager; or (b) a cytokine molecule. In some embodiments, the T cell engager comprises an antigen binding domain that binds to the variable chain of the beta subunit of TCR (TCRβV or TCRvβ), e.g., a TCRβ V6 or TCRβ V12. In some embodiments, the NK cell engager comprises an antigen binding domain that binds to NKp30. In some embodiments, the cytokine molecule comprises an IL-2 molecule.

[0076] In some embodiments, the multispecific or multifunctional molecule is a bispecific (or bifunctional) molecule, a trispecific (or trifunctional) molecule, or a tetraspecific (or tetrafunctional) molecule. In some embodiments, the multispecific or multifunctional molecule is a bispecific molecule.

[0077] Without being bound by theory, the multispecific or multifunctional molecules disclosed herein are expected to localize (e.g., bridge) and/or activate an immune cell (e.g., an immune effector cell chosen from a T cell, an NK cell, a B cell, a dendritic cell or a macrophage), in the presence of a cell expressing CD33, e.g., on the surface. Increasing the proximity and/or activity of the immune cell, in the presence of the cell expressing CD33, using the multispecific or multifunctional molecules described herein is expected to enhance an immune response against the target cell, thereby providing a more effective therapy.

[0078] Accordingly, provided herein are, inter alia, multispecific or multifunctional molecules (e.g., multispecific or multifunctional antibody molecules) that include the aforesaid moieties, nucleic acids encoding the same, methods of producing the aforesaid molecules, and methods of treating a disease or disorder, e.g., cancer, using the aforesaid molecules.

### Definitions

[0079] In some embodiments, the multifunctional molecule includes an immune cell engager. “An immune cell engager” refers to one or more binding specificities that bind and/or activate an immune cell, e.g., a cell involved in an immune response. In embodiments, the immune cell is chosen from a T cell, an NK cell, a B cell, a dendritic cell, and/or the macrophage cell. The immune cell engager can be an antibody molecule, a receptor molecule (e.g., a full length receptor, receptor fragment, or fusion thereof (e.g., a receptor-Fc fusion)), or a ligand molecule (e.g., a full length ligand, ligand fragment, or fusion thereof (e.g., a ligand-Fc fusion)) that binds to the immune cell antigen (e.g., the T cell, the NK cell antigen, the B cell antigen, the dendritic cell antigen, and/or the macrophage cell antigen). In embodiments, the immune cell engager specifically binds to the target immune cell, e.g., binds preferentially to the target immune cell. For example, when the immune cell engager is an antibody molecule, it binds to an immune cell antigen (e.g., a T cell antigen, an NK cell antigen, a B cell antigen, a dendritic cell antigen, and/or a macrophage cell antigen) with a dissociation constant of less than about 10 nM.

[0080] As used herein, the terms “T cell receptor beta variable chain,” “TCRVβ,” “TCRVb,” and “TCRβV” are used interchangeably to refer to an extracellular region of the T cell receptor beta chain which comprises the antigen recognition domain of the T cell receptor. The term TCRVβ or TCRβV includes isoforms, mammalian, e.g., human TCRβV, species homologs of human and analogs comprising at least one common epitope with TCRβV. Human TCRβV comprises a gene family comprising subfamilies including, but not limited to: a TCRβ V6 subfamily, a TCRβ V10 subfamily, a TCRβ V12 subfamily, a TCRβ V5 subfamily, a TCRβ V7 subfamily, a TCRβ V11 subfamily, a TCRβ V14 subfamily, a TCRβ V16 subfamily, a TCRβ V18 subfamily, a TCRβ V9 subfamily, a TCRβ V13 subfamily, a TCRβ V4 subfamily, a TCRβ V3 subfamily, a TCRβ V2 subfamily, a TCRβ V15 subfamily, a TCRβ V30 subfamily, a TCRβ V19 subfamily, a TCRβ V27 subfamily, a TCRβ V28 subfamily, a TCRβ V24 subfamily, a TCRβ V20 subfamily, TCRβ V25 subfamily, or a TCRβ V29 subfamily. In some embodiments, the TCRβ V6 subfamily comprises: TCRβ V6-4*01, TCRβ V6-4*02, TCRβ V6-9*01, TCRβ V6-8*01, TCRβ V6-5*01, TCRβ V6-6*02, TCRβ V6-6*01, TCRβ V6-2*01, TCRβ V6-3*01 or TCRβ V6-1*01. In some embodiments, TCRβV comprises TCRβ V6-5*01. TCRβ V6-5*01 is also known as TRBV65; TCRBV6S5; TCRBV13S1, or TCRβ V13.1. The amino acid sequence of TCRβ V6-5*01, e.g., human TCRβ V6-5*01, is known in that art, e.g., as provided by IMGT ID L36092. In some embodiments, TCRβ V6-5*01 is encoded by the nucleic acid sequence of SEQ ID NO: 1043, or a sequence having 85%, 90%, 95%, 99% or more identity thereof. In some embodiments, TCRβ V6-5*01 comprises the amino acid sequence of SEQ ID NO: 1044, or a sequence having 85%, 90%, 95%, 99% or more identity thereof.

[0081] In some embodiments, the multifunctional molecule includes a cytokine molecule. As used herein, a “cytokine molecule” refers to full length, a fragment or a variant of a cytokine; a cytokine further comprising a receptor domain, e.g., a cytokine receptor dimerizing domain; or an agonist of a cytokine receptor, e.g., an antibody molecule (e.g., an agonistic antibody) to a cytokine receptor, that elicits at least one activity of a naturally-occurring cytokine. In some embodiments the cytokine molecule is chosen from interleukin-2 (IL-2), interleukin-7 (IL-7), interleukin-12 (IL-12), interleukin-15 (IL-15), interleukin-18 (IL-18), interleukin-21 (IL-21), or interferon gamma, or a fragment or variant thereof, or a combination of any of the aforesaid cytokines. The cytokine molecule can be a monomer or a dimer. In embodiments, the cytokine molecule can further include a cytokine receptor dimerizing domain. In other embodiments, the cytokine molecule is an agonist of a cytokine receptor, e.g., an antibody molecule (e.g., an agonistic antibody) to a cytokine receptor chosen from an IL-15Ra or IL-21R.

[0082] As used herein, the term “molecule” as used in, e.g., antibody molecule, cytokine molecule, receptor molecule, includes full-length, naturally-occurring molecules, as well as variants, e.g., functional variants (e.g., truncations, fragments, mutated (e.g., substantially similar sequences) or derivatized form thereof), so long as at least one function and/or activity of the unmodified (e.g., naturally-occurring) molecule remains.

[0083] In some embodiments, the multifunctional molecule includes a stromal modifying moiety. A “stromal modifying moiety,” as used herein refers to an agent, e.g., a protein (e.g., an enzyme), that is capable of altering, e.g., degrading a component of, the stroma. In embodiments, the component of the stroma is chosen from, e.g., an ECM component, e.g., a glycosaminoglycan, e.g., hyaluronan (also known as hyaluronic acid or HA), chondroitin sulfate, chondroitin, dermatan sulfate, heparin sulfate, heparin, entactin, tenascin, aggrecan and keratin sulfate; or an extracellular protein, e.g., collagen, laminin, elastin, fibrinogen, fibronectin, and vitronectin.

[0084] As used herein, the term “CD33” refers to a protein that in humans is encoded by the gene CD33, or its orthologs. Swiss-Prot accession number P20138 provides exemplary human CD33 amino acid sequences.

[0085] Certain terms are defined below.

[0086] As used herein, the articles “a” and “an” refer to one or more than one, e.g., to at least one, of the grammatical object of the article. The use of the words “a” or “an” when used in conjunction with the term “comprising” herein may mean “one,” but it is also consistent with the meaning of “one or more,” “at least one,” and “one or more than one.”

[0087] As used herein, “about” and “approximately” generally mean an acceptable degree of error for the quantity measured given the nature or precision of the measurements. Exemplary degrees of error are within 20 percent (%), typically, within 10%, and more typically, within 5% of a given range of values.

[0088] “Antibody molecule” as used herein refers to a protein, e.g., an immunoglobulin chain or fragment thereof, comprising at least one immunoglobulin variable domain sequence. An antibody molecule encompasses antibodies (e.g., full-length antibodies) and antibody fragments. In an embodiment, an antibody molecule comprises an antigen binding or functional fragment of a full-length antibody, or a full-length immunoglobulin chain. For example, a full-length antibody is an immunoglobulin (Ig) molecule (e.g., an IgG antibody) that is naturally occurring or formed by normal immunoglobulin gene fragment recombinatorial processes). In embodiments, an antibody molecule refers to an immunologically active, antigen-binding portion of an immunoglobulin molecule, such as an antibody fragment. An antibody fragment, e.g., functional fragment, is a portion of an antibody, e.g., Fab, Fab′, F(ab′)₂, F(ab)₂, variable fragment (Fv), domain antibody (dAb), or single chain variable fragment (scFv). A functional antibody fragment binds to the same antigen as that recognized by the intact (e.g., full-length) antibody. The terms “antibody fragment” or “functional fragment” also include isolated fragments consisting of the variable regions, such as the “Fv” fragments consisting of the variable regions of the heavy and light chains or recombinant single chain polypeptide molecules in which light and heavy variable regions are connected by a peptide linker (“scFv proteins”). In some embodiments, an antibody fragment does not include portions of antibodies without antigen binding activity, such as Fc fragments or single amino acid residues. Exemplary antibody molecules include full length antibodies and antibody fragments, e.g., dAb (domain antibody), single chain, Fab, Fab′, and F(ab′)₂ fragments, and single chain variable fragments (scFvs).

[0089] As used herein, an “immunoglobulin variable domain sequence” refers to an amino acid sequence which can form the structure of an immunoglobulin variable domain. For example, the sequence may include all or part of the amino acid sequence of a naturally-occurring variable domain. For example, the sequence may or may not include one, two, or more N- or C-terminal amino acids, or may include other alterations that are compatible with formation of the protein structure.

[0090] In embodiments, an antibody molecule is monospecific, e.g., it comprises binding specificity for a single epitope. In some embodiments, an antibody molecule is multispecific, e.g., it comprises a plurality of immunoglobulin variable domain sequences, where a first immunoglobulin variable domain sequence has binding specificity for a first epitope and a second immunoglobulin variable domain sequence has binding specificity for a second epitope. In some embodiments, an antibody molecule is a bispecific antibody molecule. “Bispecific antibody molecule” as used herein refers to an antibody molecule that has specificity for more than one (e.g., two, three, four, or more) epitope and/or antigen.

[0091] “Antigen” (Ag) as used herein refers to a molecule that can provoke an immune response, e.g., involving activation of certain immune cells and/or antibody generation. Any macromolecule, including almost all proteins or peptides, can be an antigen. Antigens can also be derived from genomic recombinant or DNA. For example, any DNA comprising a nucleotide sequence or a partial nucleotide sequence that encodes a protein capable of eliciting an immune response encodes an “antigen.” In embodiments, an antigen does not need to be encoded solely by a full-length nucleotide sequence of a gene, nor does an antigen need to be encoded by a gene at all. In embodiments, an antigen can be synthesized or can be derived from a biological sample, e.g., a tissue sample, a tumor sample, a cell, or a fluid with other biological components. As used, herein a “tumor antigen” or interchangeably, a “cancer antigen” includes any molecule present on, or associated with, a cancer, e.g., a cancer cell or a tumor microenvironment that can provoke an immune response. As used, herein an “immune cell antigen” includes any molecule present on, or associated with, an immune cell that can provoke an immune response.

[0092] The “antigen-binding site,” or “binding portion” of an antibody molecule refers to the part of an antibody molecule, e.g., an immunoglobulin (Ig) molecule, that participates in antigen binding. In embodiments, the antigen binding site is formed by amino acid residues of the variable (V) regions of the heavy (H) and light (L) chains. Three highly divergent stretches within the variable regions of the heavy and light chains, referred to as hypervariable regions, are disposed between more conserved flanking stretches called “framework regions,” (FRs). FRs are amino acid sequences that are naturally found between, and adjacent to, hypervariable regions in immunoglobulins. In embodiments, in an antibody molecule, the three hypervariable regions of a light chain and the three hypervariable regions of a heavy chain are disposed relative to each other in three dimensional space to form an antigen-binding surface, which is complementary to the three-dimensional surface of a bound antigen. The three hypervariable regions of each of the heavy and light chains are referred to as “complementarity-determining regions,” or “CDRs.” The framework region and CDRs have been defined and described, e.g., in Kabat, E. A., et al. (1991) Sequences of Proteins of Immunological Interest, Fifth Edition, U.S. Department of Health and Human Services, NIH Publication No. 91-3242, and Chothia, C. et al. (1987) J. Mol. Biol. 196:901-917. Each variable chain (e.g., variable heavy chain and variable light chain) is typically made up of three CDRs and four FRs, arranged from amino-terminus to carboxy-terminus in the amino acid order: FR1, CDR1, FR2, CDR2, FR3, CDR3, and FR4.

[0093] “Cancer” as used herein can encompass all types of oncogenic processes and/or cancerous growths. In embodiments, cancer includes primary tumors as well as metastatic tissues or malignantly transformed cells, tissues, or organs. In embodiments, cancer encompasses all histopathologies and stages, e.g., stages of invasiveness/severity, of a cancer. In embodiments, cancer includes relapsed and/or resistant cancer. The terms “cancer” and “tumor” can be used interchangeably. For example, both terms encompass solid and liquid tumors. As used herein, the term “cancer” or “tumor” includes premalignant, as well as malignant cancers and tumors.

[0094] As used herein, an “immune cell” refers to any of various cells that function in the immune system, e.g., to protect against agents of infection and foreign matter. In embodiments, this term includes leukocytes, e.g., neutrophils, eosinophils, basophils, lymphocytes, and monocytes. Innate leukocytes include phagocytes (e.g., macrophages, neutrophils, and dendritic cells), mast cells, eosinophils, basophils, and natural killer cells. Innate leukocytes identify and eliminate pathogens, either by attacking larger pathogens through contact or by engulfing and then killing microorganisms, and are mediators in the activation of an adaptive immune response. The cells of the adaptive immune system are special types of leukocytes, called lymphocytes. B cells and T cells are important types of lymphocytes and are derived from hematopoietic stem cells in the bone marrow. B cells are involved in the humoral immune response, whereas T cells are involved in cell-mediated immune response. The term “immune cell” includes immune effector cells.

[0095] “Immune effector cell,” as that term is used herein, refers to a cell that is involved in an immune response, e.g., in the promotion of an immune effector response. Examples of immune effector cells include, but are not limited to, T cells, e.g., alpha/beta T cells and gamma/delta T cells, B cells, natural killer (NK) cells, natural killer T (NK T) cells, and mast cells.

[0096] The term “effector function” or “effector response” refers to a specialized function of a cell. Effector function of a T cell, for example, may be cytolytic activity or helper activity including the secretion of cytokines.

[0097] The compositions and methods of the present invention encompass polypeptides and nucleic acids having the sequences specified, or sequences substantially identical or similar thereto, e.g., sequences at least 80%, 85%, 90%, 95% identical or higher to the sequence specified. In the context of an amino acid sequence, the term “substantially identical” is used herein to refer to a first amino acid that contains a sufficient or minimum number of amino acid residues that are i) identical to, or ii) conservative substitutions of aligned amino acid residues in a second amino acid sequence such that the first and second amino acid sequences can have a common structural domain and/or common functional activity. For example, amino acid sequences that contain a common structural domain having at least about 80%, 85%, 90%. 91%, 92%, 93%, 94%, 95%, 96%, 97%, 98% or 99% identity to a reference sequence, e.g., a sequence provided herein.

[0098] In the context of nucleotide sequence, the term “substantially identical” is used herein to refer to a first nucleic acid sequence that contains a sufficient or minimum number of nucleotides that are identical to aligned nucleotides in a second nucleic acid sequence such that the first and second nucleotide sequences encode a polypeptide having common functional activity, or encode a common structural polypeptide domain or a common functional polypeptide activity. For example, nucleotide sequences having at least about 80%, 85%, 90%, 91%, 92%, 93%, 94%, 95%, 96%, 97%, 98% or 99% identity to a reference sequence, e.g., a sequence provided herein.

[0099] The term “variant” refers to a polypeptide that has a substantially identical amino acid sequence to a reference amino acid sequence, or is encoded by a substantially identical nucleotide sequence. In some embodiments, the variant is a functional variant.

[0100] The term “functional variant” refers to a polypeptide that has a substantially identical amino acid sequence to a reference amino acid sequence, or is encoded by a substantially identical nucleotide sequence, and is capable of having one or more activities of the reference amino acid sequence.

[0101] Calculations of homology or sequence identity between sequences (the terms are used interchangeably herein) are performed as follows.

[0102] To determine the percent identity of two amino acid sequences, or of two nucleic acid sequences, the sequences are aligned for optimal comparison purposes (e.g., gaps can be introduced in one or both of a first and a second amino acid or nucleic acid sequence for optimal alignment and non-homologous sequences can be disregarded for comparison purposes). In a preferred embodiment, the length of a reference sequence aligned for comparison purposes is at least 30%, preferably at least 40%, more preferably at least 50%, 60%, and even more preferably at least 70%, 80%, 90%, 100% of the length of the reference sequence. The amino acid residues or nucleotides at corresponding amino acid positions or nucleotide positions are then compared. When a position in the first sequence is occupied by the same amino acid residue or nucleotide as the corresponding position in the second sequence, then the molecules are identical at that position (as used herein amino acid or nucleic acid “identity” is equivalent to amino acid or nucleic acid “homology”).

[0103] The percent identity between the two sequences is a function of the number of identical positions shared by the sequences, taking into account the number of gaps, and the length of each gap, which need to be introduced for optimal alignment of the two sequences.

[0104] The comparison of sequences and determination of percent identity between two sequences can be accomplished using a mathematical algorithm. In a preferred embodiment, the percent identity between two amino acid sequences is determined using the Needleman and Wunsch ((1970) J. Mol. Biol. 48:444-453) algorithm which has been incorporated into the GAP program in the GCG software package (available at http://www.gcg.com), using either a Blossum 62 matrix or a PAM250 matrix, and a gap weight of 16, 14, 12, 10, 8, 6, or 4 and a length weight of 1, 2, 3, 4, 5, or 6. In yet another preferred embodiment, the percent identity between two nucleotide sequences is determined using the GAP program in the GCG software package (available at http://www.gcg.com), using a NWSgapdna.CMP matrix and a gap weight of 40, 50, 60, 70, or 80 and a length weight of 1, 2, 3, 4, 5, or 6. A particularly preferred set of parameters (and the one that should be used unless otherwise specified) are a Blossum 62 scoring matrix with a gap penalty of 12, a gap extend penalty of 4, and a frameshift gap penalty of 5.

[0105] The percent identity between two amino acid or nucleotide sequences can be determined using the algorithm of E. Meyers and W. Miller ((1989) CABIOS, 4:11-17) which has been incorporated into the ALIGN program (version 2.0), using a PAM120 weight residue table, a gap length penalty of 12 and a gap penalty of 4.

[0106] The nucleic acid and protein sequences described herein can be used as a “query sequence” to perform a search against public databases to, for example, identify other family members or related sequences. Such searches can be performed using the NBLAST and XBLAST programs (version 2.0) of Altschul, et al. (1990) J Mol. Biol. 215:403-10. BLAST nucleotide searches can be performed with the NBLAST program, score=100, wordlength=12 to obtain nucleotide sequences homologous to a nucleic acid molecule of the invention. BLAST protein searches can be performed with the XBLAST program, score=50, wordlength=3 to obtain amino acid sequences homologous to protein molecules of the invention. To obtain gapped alignments for comparison purposes, Gapped BLAST can be utilized as described in Altschul et al., (1997) Nucleic Acids Res. 25:3389-3402. When utilizing BLAST and Gapped BLAST programs, the default parameters of the respective programs (e.g., XBLAST and NBLAST) can be used. See http://www.ncbi.nlm.nih.gov.

[0107] It is understood that the molecules of the present invention may have additional conservative or non-essential amino acid substitutions, which do not have a substantial effect on their functions.

[0108] The term “amino acid” is intended to embrace all molecules, whether natural or synthetic, which include both an amino functionality and an acid functionality and capable of being included in a polymer of naturally-occurring amino acids. Exemplary amino acids include naturally-occurring amino acids; analogs, derivatives and congeners thereof, amino acid analogs having variant side chains; and all stereoisomers of any of any of the foregoing. As used herein the term “amino acid” includes both the D- or L-optical isomers and peptidomimetics.

[0109] A “conservative amino acid substitution” is one in which the amino acid residue is replaced with an amino acid residue having a similar side chain. Families of amino acid residues having similar side chains have been defined in the art. These families include amino acids with basic side chains (e.g., lysine, arginine, histidine), acidic side chains (e.g., aspartic acid, glutamic acid), uncharged polar side chains (e.g., glycine, asparagine, glutamine, serine, threonine, tyrosine, cysteine), nonpolar side chains (e.g., alanine, valine, leucine, isoleucine, proline, phenylalanine, methionine, tryptophan), beta-branched side chains (e.g., threonine, valine, isoleucine) and aromatic side chains (e.g., tyrosine, phenylalanine, tryptophan, histidine).

[0110] The terms “polypeptide”, “peptide” and “protein” (if single chain) are used interchangeably herein to refer to polymers of amino acids of any length. The polymer may be linear or branched, it may comprise modified amino acids, and it may be interrupted by non-amino acids. The terms also encompass an amino acid polymer that has been modified; for example, disulfide bond formation, glycosylation, lipidation, acetylation, phosphorylation, or any other manipulation, such as conjugation with a labeling component. The polypeptide can be isolated from natural sources, can be a produced by recombinant techniques from a eukaryotic or prokaryotic host, or can be a product of synthetic procedures.

[0111] The terms “nucleic acid,” “nucleic acid sequence,” “nucleotide sequence,” or “polynucleotide sequence,” and “polynucleotide” are used interchangeably. They refer to a polymeric form of nucleotides of any length, either deoxyribonucleotides or ribonucleotides, or analogs thereof. The polynucleotide may be either single-stranded or double-stranded, and if single-stranded may be the coding strand or non-coding (antisense) strand. A polynucleotide may comprise modified nucleotides, such as methylated nucleotides and nucleotide analogs. The sequence of nucleotides may be interrupted by non-nucleotide components. A polynucleotide may be further modified after polymerization, such as by conjugation with a labeling component. The nucleic acid may be a recombinant polynucleotide, or a polynucleotide of genomic, cDNA, semisynthetic, or synthetic origin which either does not occur in nature or is linked to another polynucleotide in a non-natural arrangement.

[0112] The term “isolated,” as used herein, refers to material that is removed from its original or native environment (e.g., the natural environment if it is naturally occurring). For example, a naturally-occurring polynucleotide or polypeptide present in a living animal is not isolated, but the same polynucleotide or polypeptide, separated by human intervention from some or all of the co-existing materials in the natural system, is isolated. Such polynucleotides could be part of a vector and/or such polynucleotides or polypeptides could be part of a composition, and still be isolated in that such vector or composition is not part of the environment in which it is found in nature.

[0113] As used herein, the term “transforming growth factor beta-1 (TGF-beta 1)” refers to a protein that in humans is encoded by the gene TGFB1, or its orthologs. Swiss-Prot accession number P01137 provides exemplary human TGF-beta 1 amino acid sequences. An exemplary immature human TGF-beta 1 amino acid sequence is provided in SEQ ID NO: 3092. An exemplary mature human TGF-beta 1 amino acid sequence is provided in SEQ ID NO: 3117.

[0114] As used herein, the term “transforming growth factor beta-2 (TGF-beta 2)” refers to a protein that in humans is encoded by the gene TGFB2, or its orthologs. Swiss-Prot accession number P61812 provides exemplary human TGF-beta 2 amino acid sequences. An exemplary immature human TGF-beta 2 amino acid sequence is provided in SEQ ID NO: 3093. An exemplary mature human TGF-beta 2 amino acid sequence is provided in SEQ ID NO: 3118.

[0115] As used herein, the term “transforming growth factor beta-3 (TGF-beta 3)” refers to a protein that in humans is encoded by the gene TGFB3, or its orthologs. Swiss-Prot accession number P10600 provides exemplary human TGF-beta 3 amino acid sequences. An exemplary immature human TGF-beta 3 amino acid sequence is provided in SEQ ID NO: 3094. An exemplary mature human TGF-beta 3 amino acid sequence is provided in SEQ ID NO: 3119.

[0116] As used herein, a “TGF-beta receptor polypeptide” refers to a TGF-beta receptor (e.g., TGFBR1, TGFBR2, or TGFBR3) or its fragment, or variant thereof.

[0117] As used herein, the term “transforming growth factor beta receptor type 1 (TGFBR1)” (also known as ALK-5 or SKR4) refers to a protein that in humans is encoded by the gene TGFBR1, or its orthologs. Swiss-Prot accession number P36897 provides exemplary human TGFBR1 amino acid sequences. Exemplary immature human TGFBR1 amino acid sequences are provided in SEQ ID NOs: 3095, 3096, and 3097. Exemplary mature human TGFBR1 amino acid sequences are provided in SEQ ID NOs: 3120, 3121, and 3122. As used herein, a “TGFBR1 polypeptide” refers to a TGFBR1 or its fragment, or variant thereof.

[0118] As used herein, the term “transforming growth factor beta receptor type 2 (TGFBR2)” refers to a protein that in humans is encoded by the gene TGFBR2, or its orthologs. Swiss-Prot accession number P37173 provides exemplary human TGFBR2 amino acid sequences. Exemplary immature human TGFBR2 amino acid sequences are provided in SEQ ID NOs: 3098 and 3099. Exemplary mature human TGFBR2 amino acid sequences are provided in SEQ ID NOs: 3123 and 3124. As used herein, a “TGFBR2 polypeptide” refers to a TGFBR2 or its fragment, or variant thereof.

[0119] As used herein, the term “transforming growth factor beta receptor type 3 (TGFBR3)” refers to a protein that in humans is encoded by the gene TGFBR3, or its orthologs. Swiss-Prot accession number Q03167 provides exemplary human TGFBR3 amino acid sequences. Exemplary immature human TGFBR3 amino acid sequences are provided in SEQ ID NOs: 3106 and 3107. Exemplary mature human TGFBR3 amino acid sequences are provided in SEQ ID NOs: 3125 and 3126. As used herein, a “TGFBR3 polypeptide” refers to a TGFBR3 or its fragment, or variant thereof.

[0120] Various aspects of the invention are described in further detail below. Additional definitions are set out throughout the specification.

### Antibody Molecules

[0121] In some embodiments, a multifunctional molecule, multispecific molecule, and/or an antigen binding domain as described herein comprises an antibody molecule. In one embodiment, the antibody molecule binds to a cancer antigen, e.g., a tumor antigen or a stromal antigen. In some embodiments, the cancer antigen is, e.g., a mammalian, e.g., a human, cancer antigen. In other embodiments, the antibody molecule binds to an immune cell antigen, e.g., a mammalian, e.g., a human, immune cell antigen. For example, the antibody molecule binds specifically to an epitope, e.g., linear or conformational epitope, on the cancer antigen or the immune cell antigen.

[0122] In an embodiment, an antibody molecule is a monospecific antibody molecule and binds a single epitope. E.g., a monospecific antibody molecule having a plurality of immunoglobulin variable domain sequences, each of which binds the same epitope.

[0123] In an embodiment an antibody molecule is a multispecific or multifunctional antibody molecule, e.g., it comprises a plurality of immunoglobulin variable domains sequences, wherein a first immunoglobulin variable domain sequence of the plurality has binding specificity for a first epitope and a second immunoglobulin variable domain sequence of the plurality has binding specificity for a second epitope. In an embodiment the first and second epitopes are on the same antigen, e.g., the same protein (or subunit of a multimeric protein). In an embodiment the first and second epitopes overlap. In an embodiment the first and second epitopes do not overlap. In an embodiment the first and second epitopes are on different antigens, e.g., the different proteins (or different subunits of a multimeric protein). In an embodiment a multispecific antibody molecule comprises a third, fourth or fifth immunoglobulin variable domain. In an embodiment, a multispecific antibody molecule is a bispecific antibody molecule, a trispecific antibody molecule, or a tetraspecific antibody molecule.

[0124] In an embodiment a multispecific antibody molecule is a bispecific antibody molecule. A bispecific antibody has specificity for no more than two antigens. A bispecific antibody molecule is characterized by a first immunoglobulin variable domain sequence which has binding specificity for a first epitope and a second immunoglobulin variable domain sequence that has binding specificity for a second epitope. In an embodiment the first and second epitopes are on the same antigen, e.g., the same protein (or subunit of a multimeric protein). In an embodiment the first and second epitopes overlap. In an embodiment the first and second epitopes do not overlap. In an embodiment the first and second epitopes are on different antigens, e.g., the different proteins (or different subunits of a multimeric protein). In an embodiment a bispecific antibody molecule comprises a heavy chain variable domain sequence and a light chain variable domain sequence which have binding specificity for a first epitope and a heavy chain variable domain sequence and a light chain variable domain sequence which have binding specificity for a second epitope. In an embodiment a bispecific antibody molecule comprises a half antibody having binding specificity for a first epitope and a half antibody having binding specificity for a second epitope. In an embodiment a bispecific antibody molecule comprises a half antibody, or fragment thereof, having binding specificity for a first epitope and a half antibody, or fragment thereof, having binding specificity for a second epitope. In an embodiment a bispecific antibody molecule comprises a scFv or a Fab, or fragment thereof, have binding specificity for a first epitope and a scFv or a Fab, or fragment thereof, have binding specificity for a second epitope.

[0125] In an embodiment, an antibody molecule comprises a diabody, and a single-chain molecule, as well as an antigen-binding fragment of an antibody (e.g., Fab, F(ab′)₂, and Fv). For example, an antibody molecule can include a heavy (H) chain variable domain sequence (abbreviated herein as VH), and a light (L) chain variable domain sequence (abbreviated herein as VL). In an embodiment an antibody molecule comprises or consists of a heavy chain and a light chain (referred to herein as a half antibody. In another example, an antibody molecule includes two heavy (H) chain variable domain sequences and two light (L) chain variable domain sequence, thereby forming two antigen binding sites, such as Fab, Fab′, F(ab′)₂, Fc, Fd, Fd′, Fv, single chain antibodies (scFv for example), single variable domain antibodies, diabodies (Dab) (bivalent and bispecific), and chimeric (e.g., humanized) antibodies, which may be produced by the modification of whole antibodies or those synthesized de novo using recombinant DNA technologies. These functional antibody fragments retain the ability to selectively bind with their respective antigen or receptor. Antibodies and antibody fragments can be from any class of antibodies including, but not limited to, IgG, IgA, IgM, IgD, and IgE, and from any subclass (e.g., IgG1, IgG2, IgG3, and IgG4) of antibodies. The a preparation of antibody molecules can be monoclonal or polyclonal. An antibody molecule can also be a human, humanized, CDR-grafted, or in vitro generated antibody. The antibody can have a heavy chain constant region chosen from, e.g., IgG1, IgG2, IgG3, or IgG4. The antibody can also have a light chain chosen from, e.g., kappa or lambda. The term “immunoglobulin” (Ig) is used interchangeably with the term “antibody” herein.

[0126] Examples of antigen-binding fragments of an antibody molecule include: (i) a Fab fragment, a monovalent fragment consisting of the VL, VH, CL and CH1 domains; (ii) a F(ab′)₂ fragment, a bivalent fragment comprising two Fab fragments linked by a disulfide bridge at the hinge region; (iii) a Fd fragment consisting of the VH and CH1 domains; (iv) a Fv fragment consisting of the VL and VH domains of a single arm of an antibody, (v) a diabody (dAb) fragment, which consists of a VH domain; (vi) a camelid or camelized variable domain; (vii) a single chain Fv (scFv), see e.g., Bird et al. (1988) Science 242:423-426; and Huston et al. (1988) Proc. Natl. Acad. Sci. USA 85:5879-5883); (viii) a single domain antibody. These antibody fragments are obtained using conventional techniques known to those with skill in the art, and the fragments are screened for utility in the same manner as are intact antibodies.

[0127] Antibody molecules include intact molecules as well as functional fragments thereof. Constant regions of the antibody molecules can be altered, e.g., mutated, to modify the properties of the antibody (e.g., to increase or decrease one or more of: Fc receptor binding, antibody glycosylation, the number of cysteine residues, effector cell function, or complement function).

[0128] Antibody molecules can also be single domain antibodies. Single domain antibodies can include antibodies whose complementary determining regions are part of a single domain polypeptide. Examples include, but are not limited to, heavy chain antibodies, antibodies naturally devoid of light chains, single domain antibodies derived from conventional 4-chain antibodies, engineered antibodies and single domain scaffolds other than those derived from antibodies. Single domain antibodies may be any of the art, or any future single domain antibodies. Single domain antibodies may be derived from any species including, but not limited to mouse, human, camel, llama, fish, shark, goat, rabbit, and bovine. According to another aspect of the invention, a single domain antibody is a naturally occurring single domain antibody known as heavy chain antibody devoid of light chains. Such single domain antibodies are disclosed in WO 9404678, for example. For clarity reasons, this variable domain derived from a heavy chain antibody naturally devoid of light chain is known herein as a VHH or nanobody to distinguish it from the conventional VH of four chain immunoglobulins. Such a VHH molecule can be derived from antibodies raised in Camelidae species, for example in camel, llama, dromedary, alpaca and guanaco. Other species besides Camelidae may produce heavy chain antibodies naturally devoid of light chain; such VHHs are within the scope of the invention.

[0129] The VH and VL regions can be subdivided into regions of hypervariability, termed “complementarity determining regions” (CDR), interspersed with regions that are more conserved, termed “framework regions” (FR or FW).

[0130] The extent of the framework region and CDRs has been precisely defined by a number of methods (see, Kabat, E. A., et al. (1991) Sequences of Proteins of Immunological Interest, Fifth Edition, U.S. Department of Health and Human Services, NIH Publication No. 91-3242; Chothia, C. et al. (1987) J Mol. Biol. 196:901-917; and the AbM definition used by Oxford Molecular's AbM antibody modeling software. See, generally, e.g., Protein Sequence and Structure Analysis of Antibody Variable Domains. In: Antibody Engineering Lab Manual (Ed.: Duebel, S. and Kontermann, R., Springer-Verlag, Heidelberg).

[0131] The terms “complementarity determining region,” and “CDR,” as used herein refer to the sequences of amino acids within antibody variable regions which confer antigen specificity and binding affinity. In general, there are three CDRs in each heavy chain variable region (HCDR1, HCDR2, HCDR3) and three CDRs in each light chain variable region (LCDR1, LCDR2, LCDR3).

[0132] The precise amino acid sequence boundaries of a given CDR can be determined using any of a number of known schemes, including those described by Kabat et al. (1991), “Sequences of Proteins of Immunological Interest,” 5th Ed. Public Health Service, National Institutes of Health, Bethesda, Md. (“Kabat” numbering scheme), Al-Lazikani et al., (1997) JMB 273, 927-948 (“Chothia” numbering scheme). As used herein, the CDRs defined according the “Chothia” number scheme are also sometimes referred to as “hypervariable loops.”

[0133] For example, under Kabat, the CDR amino acid residues in the heavy chain variable domain (VH) are numbered 31-35 (HCDR1), 50-65 (HCDR2), and 95-102 (HCDR3); and the CDR amino acid residues in the light chain variable domain (VL) are numbered 24-34 (LCDR1), 50-56 (LCDR2), and 89-97 (LCDR3). Under Chothia, the CDR amino acids in the VH are numbered 26-32 (HCDR1), 52-56 (HCDR2), and 95-102 (HCDR3); and the amino acid residues in VL are numbered 26-32 (LCDR1), 50-52 (LCDR2), and 91-96 (LCDR3).

[0134] Each VH and VL typically includes three CDRs and four FRs, arranged from amino-terminus to carboxy-terminus in the following order: FR1, CDR1, FR2, CDR2, FR3, CDR3, FR4.

[0135] The antibody molecule can be a polyclonal or a monoclonal antibody.

[0136] The terms “monoclonal antibody” or “monoclonal antibody composition” as used herein refer to a preparation of antibody molecules of single molecular composition. A monoclonal antibody composition displays a single binding specificity and affinity for a particular epitope. A monoclonal antibody can be made by hybridoma technology or by methods that do not use hybridoma technology (e.g., recombinant methods).

[0137] The antibody can be recombinantly produced, e.g., produced by phage display or by combinatorial methods.

[0138] Phage display and combinatorial methods for generating antibodies are known in the art (as described in, e.g., Ladner et al. U.S. Pat. No. 5,223,409; Kang et al. International Publication No. WO 92/18619; Dower et al. International Publication No. WO 91/17271; Winter et al. International Publication WO 92/20791; Markland et al. International Publication No. WO 92/15679; Breitling et al. International Publication WO 93/01288; McCafferty et al. International Publication No. WO 92/01047; Garrard et al. International Publication No. WO 92/09690; Ladner et al. International Publication No. WO 90/02809; Fuchs et al. (1991) Bio/Technology 9:1370-1372; Hay et al. (1992) Hum Antibod Hybridomas 3:81-85; Huse et al. (1989) Science 246:1275-1281; Griffths et al. (1993) EMBO J 12:725-734; Hawkins et al. (1992) J Mol Biol 226:889-896; Clackson et al. (1991) Nature 352:624-628; Gram et al. (1992) PNAS 89:3576-3580; Garrad et al. (1991) Bio/Technology 9:1373-1377; Hoogenboom et al. (1991) Nucl Acid Res 19:4133-4137; and Barbas et al. (1991) PNAS 88:7978-7982, the contents of all of which are incorporated by reference herein).

[0139] In one embodiment, the antibody is a fully human antibody (e.g., an antibody made in a mouse which has been genetically engineered to produce an antibody from a human immunoglobulin sequence), or a non-human antibody, e.g., a rodent (mouse or rat), goat, primate (e.g., monkey), camel antibody. Preferably, the non-human antibody is a rodent (mouse or rat antibody). Methods of producing rodent antibodies are known in the art.

[0140] Human monoclonal antibodies can be generated using transgenic mice carrying the human immunoglobulin genes rather than the mouse system. Splenocytes from these transgenic mice immunized with the antigen of interest are used to produce hybridomas that secrete human mAbs with specific affinities for epitopes from a human protein (see, e.g., Wood et al. International Application WO 91/00906, Kucherlapati et al. PCT publication WO 91/10741; Lonberg et al. International Application WO 92/03918; Kay et al. International Application 92/03917; Lonberg, N. et al. 1994 Nature 368:856-859; Green, L. L. et al. 1994 Nature Genet. 7:13-21; Morrison, S. L. et al. 1994 Proc. Natl. Acad. Sci. USA 81:6851-6855; Bruggeman et al. 1993 Year Immunol 7:33-40; Tuaillon et al. 1993 PNAS 90:3720-3724; Bruggeman et al. Eur J Immunol 21:1323-1326).

[0141] An antibody molecule can be one in which the variable region, or a portion thereof, e.g., the CDRs, are generated in a non-human organism, e.g., a rat or mouse. Chimeric, CDR-grafted, and humanized antibodies are within the invention. Antibody molecules generated in a non-human organism, e.g., a rat or mouse, and then modified, e.g., in the variable framework or constant region, to decrease antigenicity in a human are within the invention.

[0142] An “effectively human” protein is a protein that does substantially not evoke a neutralizing antibody response, e.g., the human anti-murine antibody (HAMA) response. HAMA can be problematic in a number of circumstances, e.g., if the antibody molecule is administered repeatedly, e.g., in treatment of a chronic or recurrent disease condition. A HAMA response can make repeated antibody administration potentially ineffective because of an increased antibody clearance from the serum (see, e.g., Saleh et al. Cancer Immunol. Immunother., 32:180-190 (1990)) and also because of potential allergic reactions (see, e.g., LoBuglio et al., Hybridoma, 5:5117-5123 (1986)).

[0143] Chimeric antibodies can be produced by recombinant DNA techniques known in the art (see Robinson et al., International Patent Publication PCT/US86/02269; Akira, et al., European Patent Application 184,187; Taniguchi, M., European Patent Application 171,496; Morrison et al., European Patent Application 173,494; Neuberger et al., International Application WO 86/01533; Cabilly et al. U.S. Pat. No. 4,816,567; Cabilly et al., European Patent Application 125,023; Better et al. (1988 Science 240:1041-1043); Liu et al. (1987) PNAS 84:3439-3443; Liu et al., 1987, J. Immunol. 139:3521-3526; Sun et al. (1987) PNAS 84:214-218; Nishimura et al., 1987, Canc. Res. 47:999-1005; Wood et al. (1985) Nature 314:446-449; and Shaw et al., 1988, J. Natl Cancer Inst. 80:1553-1559).

[0144] A humanized or CDR-grafted antibody will have at least one or two but generally all three recipient CDRs (of heavy and or light immuoglobulin chains) replaced with a donor CDR. The antibody may be replaced with at least a portion of a non-human CDR or only some of the CDRs may be replaced with non-human CDRs. It is only necessary to replace the number of CDRs required for binding to the antigen. Preferably, the donor will be a rodent antibody, e.g., a rat or mouse antibody, and the recipient will be a human framework or a human consensus framework. Typically, the immunoglobulin providing the CDRs is called the “donor” and the immunoglobulin providing the framework is called the “acceptor.” In one embodiment, the donor immunoglobulin is a non-human (e.g., rodent). The acceptor framework is a naturally-occurring (e.g., a human) framework or a consensus framework, or a sequence about 85% or higher, preferably 90%, 95%, 99% or higher identical thereto.

[0145] As used herein, the term “consensus sequence” refers to the sequence formed from the most frequently occurring amino acids (or nucleotides) in a family of related sequences (See e.g., Winnaker, From Genes to Clones (Verlagsgesellschaft, Weinheim, Germany 1987). In a family of proteins, each position in the consensus sequence is occupied by the amino acid occurring most frequently at that position in the family. If two amino acids occur equally frequently, either can be included in the consensus sequence. A “consensus framework” refers to the framework region in the consensus immunoglobulin sequence.

[0146] An antibody molecule can be humanized by methods known in the art (see e.g., Morrison, S. L., 1985, Science 229:1202-1207, by Oi et al., 1986, BioTechniques 4:214, and by Queen et al. U.S. Pat. Nos. 5,585,089, 5,693,761 and 5,693,762, the contents of all of which are hereby incorporated by reference).

[0147] Humanized or CDR-grafted antibody molecules can be produced by CDR-grafting or CDR substitution, wherein one, two, or all CDRs of an immunoglobulin chain can be replaced. See e.g., U.S. Pat. No. 5,225,539; Jones et al. 1986 Nature 321:552-525; Verhoeyan et al. 1988 Science 239:1534; Beidler et al. 1988 J. Immunol. 141:4053-4060; Winter U.S. Pat. No. 5,225,539, the contents of all of which are hereby expressly incorporated by reference. Winter describes a CDR-grafting method which may be used to prepare the humanized antibodies of the present invention (UK Patent Application GB 2188638A, filed on Mar. 26, 1987; Winter U.S. Pat. No. 5,225,539), the contents of which is expressly incorporated by reference.

[0148] Also within the scope of the invention are humanized antibody molecules in which specific amino acids have been substituted, deleted or added. Criteria for selecting amino acids from the donor are described in U.S. Pat. No. 5,585,089, e.g., columns 12-16 of U.S. Pat. No. 5,585,089, e.g., columns 12-16 of U.S. Pat. No. 5,585,089, the contents of which are hereby incorporated by reference. Other techniques for humanizing antibodies are described in Padlan et al. EP 519596 A1, published on Dec. 23, 1992.

[0149] The antibody molecule can be a single chain antibody. A single-chain antibody (scFV) may be engineered (see, for example, Colcher, D. et al. (1999) Ann NY Acad Sci 880:263-80; and Reiter, Y. (1996) Clin Cancer Res 2:245-52). The single chain antibody can be dimerized or multimerized to generate multivalent antibodies having specificities for different epitopes of the same target protein.

[0150] In yet other embodiments, the antibody molecule has a heavy chain constant region chosen from, e.g., the heavy chain constant regions of IgG1, IgG2, IgG3, IgG4, IgM, IgA1, IgA2, IgD, and IgE; particularly, chosen from, e.g., the (e.g., human) heavy chain constant regions of IgG1, IgG2, IgG3, and IgG4. In another embodiment, the antibody molecule has a light chain constant region chosen from, e.g., the (e.g., human) light chain constant regions of kappa or lambda. The constant region can be altered, e.g., mutated, to modify the properties of the antibody (e.g., to increase or decrease one or more of: Fc receptor binding, antibody glycosylation, the number of cysteine residues, effector cell function, and/or complement function). In one embodiment the antibody has: effector function; and can fix complement. In other embodiments the antibody does not; recruit effector cells; or fix complement. In another embodiment, the antibody has reduced or no ability to bind an Fc receptor. For example, it is a isotype or subtype, fragment or other mutant, which does not support binding to an Fc receptor, e.g., it has a mutagenized or deleted Fc receptor binding region.

[0151] Methods for altering an antibody constant region are known in the art. Antibodies with altered function, e.g. altered affinity for an effector ligand, such as FcR on a cell, or the C1 component of complement can be produced by replacing at least one amino acid residue in the constant portion of the antibody with a different residue (see e.g., EP 388,151 A1, U.S. Pat. Nos. 5,624,821 and 5,648,260, the contents of all of which are hereby incorporated by reference). Similar type of alterations could be described which if applied to the murine, or other species immunoglobulin would reduce or eliminate these functions.

[0152] An antibody molecule can be derivatized or linked to another functional molecule (e.g., another peptide or protein). As used herein, a “derivatized” antibody molecule is one that has been modified. Methods of derivatization include but are not limited to the addition of a fluorescent moiety, a radionucleotide, a toxin, an enzyme or an affinity ligand such as biotin. Accordingly, the antibody molecules of the invention are intended to include derivatized and otherwise modified forms of the antibodies described herein, including immunoadhesion molecules. For example, an antibody molecule can be functionally linked (by chemical coupling, genetic fusion, noncovalent association or otherwise) to one or more other molecular entities, such as another antibody (e.g., a bispecific antibody or a diabody), a detectable agent, a cytotoxic agent, a pharmaceutical agent, and/or a protein or peptide that can mediate association of the antibody or antibody portion with another molecule (such as a streptavidin core region or a polyhistidine tag).

[0153] One type of derivatized antibody molecule is produced by crosslinking two or more antibodies (of the same type or of different types, e.g., to create bispecific antibodies). Suitable crosslinkers include those that are heterobifunctional, having two distinctly reactive groups separated by an appropriate spacer (e.g., m-maleimidobenzoyl-N-hydroxysuccinimide ester) or homobifunctional (e.g., disuccinimidyl suberate). Such linkers are available from Pierce Chemical Company, Rockford, Ill.

### Multispecific or Multifunctional Antibody Molecules

[0154] Exemplary structures of multispecific and multifunctional molecules defined herein are described throughout. Exemplary structures are further described in: Weidle U et al. (2013) The Intriguing Options of Multispecific Antibody Formats for Treatment of Cancer. Cancer Genomics & Proteomics 10: 1-18 (2013); and Spiess C et al. (2015) Alternative molecular formats and therapeutic applications for bispecific antibodies. Molecular Immunology 67: 95-106; the full contents of each of which is incorporated by reference herein).

[0155] In embodiments, multispecific antibody molecules can comprise more than one antigen-binding site, where different sites are specific for different antigens. In embodiments, multispecific antibody molecules can bind more than one (e.g., two or more) epitopes on the same antigen. In embodiments, multispecific antibody molecules comprise an antigen-binding site specific for a target cell (e.g., cancer cell) and a different antigen-binding site specific for an immune effector cell. In embodiments, the multispecific antibody molecule is a bispecific, trispecific, or tetraspecific antibody molecule. In one embodiment, the multispecific antibody molecule is a bispecific antibody molecule. Bispecific antibody molecules can be classified into five different structural groups: (i) bispecific immunoglobulin G (BsIgG); (ii) IgG appended with an additional antigen-binding moiety; (iii) bispecific antibody fragments; (iv) bispecific fusion proteins; and (v) bispecific antibody conjugates.

[0156] BsIgG is a format that is monovalent for each antigen. Exemplary BsIgG formats include but are not limited to crossMab, DAF (two-in-one), DAF (four-in-one), DutaMab, DT-IgG, knobs-in-holes common LC, knobs-in-holes assembly, charge pair, Fab-arm exchange, SEEDbody, triomab, LUZ-Y, Fcab, KX-body, orthogonal Fab. See Spiess et al. Mol. Immunol. 67(2015):95-106. Exemplary BsIgGs include catumaxomab (Fresenius Biotech, Trion Pharma, Neopharm), which contains an anti-CD3 arm and an anti-EpCAM arm; and ertumaxomab (Neovii Biotech, Fresenius Biotech), which targets CD3 and HER2. In some embodiments, BsIgG comprises heavy chains that are engineered for heterodimerization. For example, heavy chains can be engineered for heterodimerization using a “knobs-into-holes” strategy, a SEED platform, a common heavy chain (e.g., in KX-bodies), and use of heterodimeric Fc regions. See Spiess et al. Mol. Immunol. 67(2015):95-106. Strategies that have been used to avoid heavy chain pairing of homodimers in BsIgG include knobs-in-holes, duobody, azymetric, charge pair, HA-TF, SEEDbody, and differential protein A affinity. See Id. BsIgG can be produced by separate expression of the component antibodies in different host cells and subsequent purification/assembly into a BsIgG. BsIgG can also be produced by expression of the component antibodies in a single host cell. BsIgG can be purified using affinity chromatography, e.g., using protein A and sequential pH elution.

[0157] IgG appended with an additional antigen-binding moiety is another format of bispecific antibody molecules. For example, monospecific IgG can be engineered to have bispecificity by appending an additional antigen-binding unit onto the monospecific IgG, e.g., at the N- or C-terminus of either the heavy or light chain. Exemplary additional antigen-binding units include single domain antibodies (e.g., variable heavy chain or variable light chain), engineered protein scaffolds, and paired antibody variable domains (e.g., single chain variable fragments or variable fragments). See Id. Examples of appended IgG formats include dual variable domain IgG (DVD-Ig), IgG(H)-scFv, scFv-(H)IgG, IgG(L)-scFv, scFv-(L)IgG, IgG(L,H)-Fv, IgG(H)-V, V(H)—IgG, IgG(L)-V, V(L)-IgG, KIH IgG-scFab, 2scFv-IgG, IgG-2scFv, scFv4-Ig, zybody, and DVI-IgG (four-in-one). See Spiess et al. Mol. Immunol. 67(2015):95-106. An example of an IgG-scFv is MM-141 (Merrimack Pharmaceuticals), which binds IGF-1R and HER3. Examples of DVD-Ig include ABT-981 (AbbVie), which binds IL-1α and IL-1β; and ABT-122 (AbbVie), which binds TNF and IL-17A.

[0158] Bispecific antibody fragments (BsAb) are a format of bispecific antibody molecules that lack some or all of the antibody constant domains. For example, some BsAb lack an Fc region. In embodiments, bispecific antibody fragments include heavy and light chain regions that are connected by a peptide linker that permits efficient expression of the BsAb in a single host cell. Exemplary bispecific antibody fragments include but are not limited to nanobody, nanobody-HAS, BiTE, Diabody, DART, TandAb, scDiabody, scDiabody-CH3, Diabody-CH3, triple body, miniantibody, minibody, TriBi minibody, scFv-CH3 KIH, Fab-scFv, scFv-CH-CL-scFv, F(ab′)2, F(ab′)2-scFv2, scFv-KIH, Fab-scFv-Fc, tetravalent HCAb, scDiabody-Fc, Diabody-Fc, tandem scFv-Fc, and intrabody. See Id. For example, the BiTE format comprises tandem scFvs, where the component scFvs bind to CD3 on T cells and a surface antigen on cancer cells

[0159] Bispecific fusion proteins include antibody fragments linked to other proteins, e.g., to add additional specificity and/or functionality. An example of a bispecific fusion protein is an immTAC, which comprises an anti-CD3 scFv linked to an affinity-matured T-cell receptor that recognizes HLA-presented peptides. In embodiments, the dock-and-lock (DNL) method can be used to generate bispecific antibody molecules with higher valency. Also, fusions to albumin binding proteins or human serum albumin can be extend the serum half-life of antibody fragments. See Id.

[0160] In embodiments, chemical conjugation, e.g., chemical conjugation of antibodies and/or antibody fragments, can be used to create BsAb molecules. See Id. An exemplary bispecific antibody conjugate includes the CovX-body format, in which a low molecular weight drug is conjugated site-specifically to a single reactive lysine in each Fab arm or an antibody or fragment thereof. In embodiments, the conjugation improves the serum half-life of the low molecular weight drug. An exemplary CovX-body is CVX-241 (NCT01004822), which comprises an antibody conjugated to two short peptides inhibiting either VEGF or Ang2. See Id.

[0161] The antibody molecules can be produced by recombinant expression, e.g., of at least one or more component, in a host system. Exemplary host systems include eukaryotic cells (e.g., mammalian cells, e.g., CHO cells, or insect cells, e.g., SF9 or S2 cells) and prokaryotic cells (e.g., E. coli). Bispecific antibody molecules can be produced by separate expression of the components in different host cells and subsequent purification/assembly. Alternatively, the antibody molecules can be produced by expression of the components in a single host cell. Purification of bispecific antibody molecules can be performed by various methods such as affinity chromatography, e.g., using protein A and sequential pH elution. In other embodiments, affinity tags can be used for purification, e.g., histidine-containing tag, myc tag, or streptavidin tag.

### CDR-Grafted Scaffolds

[0162] In embodiments, the antibody molecule is a CDR-grafted scaffold domain. In embodiments, the scaffold domain is based on a fibronectin domain, e.g., fibronectin type III domain. The overall fold of the fibronectin type III (Fn3) domain is closely related to that of the smallest functional antibody fragment, the variable domain of the antibody heavy chain. There are three loops at the end of Fn3; the positions of BC, DE and FG loops approximately correspond to those of CDR1, 2 and 3 of the VH domain of an antibody. Fn3 does not have disulfide bonds; and therefore Fn3 is stable under reducing conditions, unlike antibodies and their fragments (see, e.g., WO 98/56915; WO 01/64942; WO 00/34784). An Fn3 domain can be modified (e.g., using CDRs or hypervariable loops described herein) or varied, e.g., to select domains that bind to an antigen/marker/cell described herein.

[0163] In embodiments, a scaffold domain, e.g., a folded domain, is based on an antibody, e.g., a “minibody” scaffold created by deleting three beta strands from a heavy chain variable domain of a monoclonal antibody (see, e.g., Tramontano et al., 1994, J Mol. Recognit. 7:9; and Martin et al., 1994, EMBO J. 13:5303-5309). The “minibody” can be used to present two hypervariable loops. In embodiments, the scaffold domain is a V-like domain (see, e.g., Coia et al. WO 99/45110) or a domain derived from tendamistatin, which is a 74 residue, six-strand beta sheet sandwich held together by two disulfide bonds (see, e.g., McConnell and Hoess, 1995, J Mol. Biol. 250:460). For example, the loops of tendamistatin can be modified (e.g., using CDRs or hypervariable loops) or varied, e.g., to select domains that bind to a marker/antigen/cell described herein. Another exemplary scaffold domain is a beta-sandwich structure derived from the extracellular domain of CTLA-4 (see, e.g., WO 00/60070).

[0164] Other exemplary scaffold domains include but are not limited to T-cell receptors; MHC proteins; extracellular domains (e.g., fibronectin Type III repeats, EGF repeats); protease inhibitors (e.g., Kunitz domains, ecotin, BPTI, and so forth); TPR repeats; trifoil structures; zinc finger domains; DNA-binding proteins; particularly monomeric DNA binding proteins; RNA binding proteins; enzymes, e.g., proteases (particularly inactivated proteases), RNase; chaperones, e.g., thioredoxin, and heat shock proteins; and intracellular signaling domains (such as SH2 and SH3 domains). See, e.g., US 20040009530 and U.S. Pat. No. 7,501,121, incorporated herein by reference.

[0165] In embodiments, a scaffold domain is evaluated and chosen, e.g., by one or more of the following criteria: (1) amino acid sequence, (2) sequences of several homologous domains, (3) 3-dimensional structure, and/or (4) stability data over a range of pH, temperature, salinity, organic solvent, oxidant concentration. In embodiments, the scaffold domain is a small, stable protein domain, e.g., a protein of less than 100, 70, 50, 40 or 30 amino acids. The domain may include one or more disulfide bonds or may chelate a metal, e.g., zinc.

### Antibody-Based Fusions

[0166] A variety of formats can be generated which contain additional binding entities attached to the N or C terminus of antibodies. These fusions with single chain or disulfide stabilized Fvs or Fabs result in the generation of tetravalent molecules with bivalent binding specificity for each antigen. Combinations of scFvs and scFabs with IgGs enable the production of molecules which can recognize three or more different antigens.

### Antibody-Fab Fusion

[0167] Antibody-Fab fusions are bispecific antibodies comprising a traditional antibody to a first target and a Fab to a second target fused to the C terminus of the antibody heavy chain. Commonly the antibody and the Fab will have a common light chain. Antibody fusions can be produced by (1) engineering the DNA sequence of the target fusion, and (2) transfecting the target DNA into a suitable host cell to express the fusion protein. It seems like the antibody-scFv fusion may be linked by a (Gly)-Ser linker between the C-terminus of the CH3 domain and the N-terminus of the scFv, as described by Coloma, J. et al. (1997) Nature Biotech 15:159.

### Antibody-scFv Fusion

[0168] Antibody-scFv Fusions are bispecific antibodies comprising a traditional antibody and a scFv of unique specificity fused to the C terminus of the antibody heavy chain. The scFv can be fused to the C terminus through the Heavy Chain of the scFv either directly or through a linker peptide. Antibody fusions can be produced by (1) engineering the DNA sequence of the target fusion, and (2) transfecting the target DNA into a suitable host cell to express the fusion protein. It seems like the antibody-scFv fusion may be linked by a (Gly)-Ser linker between the C-terminus of the CH3 domain and the N-terminus of the scFv, as described by Coloma, J. et al. (1997) Nature Biotech 15:159.

### Variable Domain Immunoglobulin DVD

[0169] A related format is the dual variable domain immunoglobulin (DVD), which are composed of VH and VL domains of a second specificity place upon the N termini of the V domains by shorter linker sequences.

[0170] Other exemplary multispecific antibody formats include, e.g., those described in the following US20160114057A1, US20130243775A1, US20140051833, US20130022601, US20150017187A1, US20120201746A1, US20150133638A1, US20130266568A1, US20160145340A1, WO2015127158A1, US20150203591A1, US20140322221A1, US20130303396A1, US20110293613, US20130017200A1, US20160102135A1, WO2015197598A2, WO2015197582A1, U.S. Pat. No. 9,359,437, US20150018529, WO2016115274A1, WO2016087416A1, US20080069820A1, U.S. Pat. Nos. 9,145,588B, 7,919,257, and US20150232560A1. Exemplary multispecific molecules utilizing a full antibody-Fab/scFab format include those described in the following, U.S. Pat. No. 9,382,323B2, US20140072581A1, US20140308285A1, US20130165638A1, US20130267686A1, US20140377269A1, U.S. Pat. No. 7,741,446B2, and WO1995009917A1. Exemplary multispecific molecules utilizing a domain exchange format include those described in the following, US20150315296A1, WO2016087650A1, US20160075785A1, WO2016016299A1, US20160130347A1, US20150166670, U.S. Pat. No. 8,703,132B2, US20100316645, U.S. Pat. No. 8,227,577B2, US20130078249.

### Fc-Containing Entities (Mini-Antibodies)

[0171] Fc-containing entities, also known as mini-antibodies, can be generated by fusing scFv to the C-termini of constant heavy region domain 3 (CH3-scFv) and/or to the hinge region (scFv-hinge-Fc) of an antibody with a different specificity. Trivalent entities can also be made which have disulfide stabilized variable domains (without peptide linker) fused to the C-terminus of CH3 domains of IgGs.

### Fc-Containing Multispecific Molecules

[0172] In some embodiments, the multispecific molecules disclosed herein includes an immunoglobulin constant region (e.g., an Fc region). Exemplary Fc regions can be chosen from the heavy chain constant regions of IgG1, IgG2, IgG3 or IgG4; more particularly, the heavy chain constant region of human IgG1, IgG2, IgG3, or IgG4.

[0173] In some embodiments, the immunoglobulin chain constant region (e.g., the Fc region) is altered, e.g., mutated, to increase or decrease one or more of: Fc receptor binding, antibody glycosylation, the number of cysteine residues, effector cell function, or complement function.

[0174] In other embodiments, an interface of a first and second immunoglobulin chain constant regions (e.g., a first and a second Fc region) is altered, e.g., mutated, to increase or decrease dimerization, e.g., relative to a non-engineered interface, e.g., a naturally-occurring interface. For example, dimerization of the immunoglobulin chain constant region (e.g., the Fc region) can be enhanced by providing an Fc interface of a first and a second Fc region with one or more of: a paired protuberance-cavity (“knob-in-a hole”), an electrostatic interaction, or a strand-exchange, such that a greater ratio of heteromultimer to homomultimer forms, e.g., relative to a non-engineered interface.

[0175] In some embodiments, the multispecific molecules include a paired amino acid substitution at a position chosen from one or more of 347, 349, 350, 351, 366, 368, 370, 392, 394, 395, 397, 398, 399, 405, 407, or 409, e.g., of the Fc region of human IgG1 For example, the immunoglobulin chain constant region (e.g., Fc region) can include a paired an amino acid substitution chosen from: T366S, L368A, or Y407V (e.g., corresponding to a cavity or hole), and T366W (e.g., corresponding to a protuberance or knob).

[0176] In other embodiments, the multifunctional molecule includes a half-life extender, e.g., a human serum albumin or an antibody molecule to human serum albumin.

### Heterodimerized Antibody Molecules & Methods of Making

[0177] Various methods of producing multispecific antibodies have been disclosed to address the problem of incorrect heavy chain pairing. Exemplary methods are described below. Exemplary multispecific antibody formats and methods of making said multispecific antibodies are also disclosed in e.g., Speiss et al. Molecular Immunology 67 (2015) 95-106; and Klein et al mAbs 4:6, 653-663; November/December 2012; the entire contents of each of which are incorporated by reference herein.

[0178] Heterodimerized bispecific antibodies are based on the natural IgG structure, wherein the two binding arms recognize different antigens. IgG derived formats that enable defined monovalent (and simultaneous) antigen binding are generated by forced heavy chain heterodimerization, combined with technologies that minimize light chain mispairing (e.g., common light chain). Forced heavy chain heterodimerization can be obtained using, e.g., knob-in-hole OR strand exchange engineered domains (SEED).

[0179] Knob-in-Hole

[0180] Knob-in-Hole as described in U.S. Pat. Nos. 5,731,116, 7,476,724 and Ridgway, J. et al. (1996) Prot. Engineering 9(7): 617-621, broadly involves: (1) mutating the CH3 domain of one or both antibodies to promote heterodimerization; and (2) combining the mutated antibodies under conditions that promote heterodimerization. “Knobs” or “protuberances” are typically created by replacing a small amino acid in a parental antibody with a larger amino acid (e.g., T366Y or T366W); “Holes” or “cavities” are created by replacing a larger residue in a parental antibody with a smaller amino acid (e.g., Y407T, T366S, L368A and/or Y407V).

[0181] For bispecific antibodies including an Fc domain, introduction of specific mutations into the constant region of the heavy chains to promote the correct heterodimerization of the Fc portion can be utilized. Several such techniques are reviewed in Klein et al. (mAbs (2012) 4:6, 1-11), the contents of which are incorporated herein by reference in their entirety. These techniques include the “knobs-into-holes” (KiH) approach which involves the introduction of a bulky residue into one of the CH3 domains of one of the antibody heavy chains. This bulky residue fits into a complementary “hole” in the other CH3 domain of the paired heavy chain so as to promote correct pairing of heavy chains (see e.g., U.S. Pat. No. 7,642,228).

[0182] Exemplary KiH mutations include S354C, T366W in the “knob” heavy chain and Y349C, T366S, L368A, Y407V in the “hole” heavy chain. Other exemplary KiH mutations are provided in Table 1, with additional optional stabilizing Fc cysteine mutations.

TABLE 1
Exemplary Fc KiH mutations and optional Cysteine mutations

| Position | Knob Mutation | Hole Mutation |
|---|---|---|
| T366 | T366W | T366S |
| L368 | — | L368A |
| Y407 | — | Y407V |

Additional Cysteine Mutations to form a stabilizing disulfide bridge

| Position | Knob CH3 | Hole CH3 |
|---|---|---|
| S354 | S354C | — |
| Y349 | — | Y349C |

[0183] Other Fc mutations are provided by Igawa and Tsunoda who identified 3 negatively charged residues in the CH3 domain of one chain that pair with three positively charged residues in the CH3 domain of the other chain. These specific charged residue pairs are: E356-K439, E357-K370, D399-K409 and vice versa. By introducing at least two of the following three mutations in chain A: E356K, E357K and D399K, as well as K370E, K409D, K439E in chain B, alone or in combination with newly identified disulfide bridges, they were able to favor very efficient heterodimerization while suppressing homodimerization at the same time (Martens T et al. A novel one-armed antic-Met antibody inhibits glioblastoma growth in vivo. Clin Cancer Res 2006; 12:6144-52; PMID:17062691). Xencor defined 41 variant pairs based on combining structural calculations and sequence information that were subsequently screened for maximal heterodimerization, defining the combination of S364H, F405A (HA) on chain A and Y349T, T394F on chain B (TF) (Moore G L et al. A novel bispecific antibody format enables simultaneous bivalent and monovalent co-engagement of distinct target antigens. MAbs 2011; 3:546-57; PMID: 22123055).

[0184] Other exemplary Fc mutations to promote heterodimerization of multispecific antibodies include those described in the following references, the contents of each of which is incorporated by reference herein, WO2016071377A1, US20140079689A1, US20160194389A1, US20160257763, WO2016071376A2, WO2015107026A1, WO2015107025A1, WO2015107015A1, US20150353636A1, US20140199294A1, U.S. Pat. No. 7,750,128B2, US20160229915A1, US20150344570A1, U.S. Pat. No. 8,003,774A1, US20150337049A1, US20150175707A1, US20140242075A1, US20130195849A1, US20120149876A1, US20140200331A1, U.S. Pat. No. 9,309,311B2, U.S. Pat. No. 8,586,713, US20140037621A1, US20130178605A1, US20140363426A1, US20140051835A1 and US20110054151A1.

[0185] Stabilizing cysteine mutations have also been used in combination with KiH and other Fc heterodimerization promoting variants, see e.g., U.S. Pat. No. 7,183,076. Other exemplary cysteine modifications include, e.g., those disclosed in US20140348839A1, U.S. Pat. No. 7,855,275B2, and U.S. Pat. No. 9,000,130B2.

[0186] Strand Exchange Engineered Domains (SEED)

[0187] Heterodimeric Fc platform that support the design of bispecific and asymmetric fusion proteins by devising strand-exchange engineered domain (SEED) C(H)3 heterodimers are known. These derivatives of human IgG and IgA C(H)3 domains create complementary human SEED C(H)3 heterodimers that are composed of alternating segments of human IgA and IgG C(H)3 sequences. The resulting pair of SEED C(H)3 domains preferentially associates to form heterodimers when expressed in mammalian cells. SEEDbody (Sb) fusion proteins consist of [IgG1 hinge]-C(H)2-[SEED C(H)3], that may be genetically linked to one or more fusion partners (see e.g., Davis J H et al. SEEDbodies: fusion proteins based on strand exchange engineered domain (SEED) CH3 heterodimers in an Fc analogue platform for asymmetric binders or immunofusions and bispecific antibodies. Protein Eng Des Sel 2010; 23:195-202; PMID:20299542 and U.S. Pat. No. 8,871,912. The contents of each of which are incorporated by reference herein).

[0188] Duobody

[0189] “Duobody” technology to produce bispecific antibodies with correct heavy chain pairing are known. The DuoBody technology involves three basic steps to generate stable bispecific human IgG1 antibodies in a post-production exchange reaction. In a first step, two IgG1s, each containing single matched mutations in the third constant (CH3) domain, are produced separately using standard mammalian recombinant cell lines. Subsequently, these IgG1 antibodies are purified according to standard processes for recovery and purification. After production and purification (post-production), the two antibodies are recombined under tailored laboratory conditions resulting in a bispecific antibody product with a very high yield (typically >95%) (see e.g., Labrijn et al, PNAS 2013; 110(13):5145-5150 and Labrijn et al. Nature Protocols 2014; 9(10):2450-63, the contents of each of which are incorporated by reference herein).

[0190] Electrostatic Interactions

[0191] Methods of making multispecific antibodies using CH3 amino acid changes with charged amino acids such that homodimer formation is electrostatically unfavorable are disclosed. EP1870459 and WO 2009089004 describe other strategies for favoring heterodimer formation upon co-expression of different antibody domains in a host cell. In these methods, one or more residues that make up the heavy chain constant domain 3 (CH3), CH3-CH3 interfaces in both CH3 domains are replaced with a charged amino acid such that homodimer formation is electrostatically unfavorable and heterodimerization is electrostatically favorable. Additional methods of making multispecific molecules using electrostatic interactions are described in the following references, the contents of each of which is incorporated by reference herein, include US20100015133, U.S. Pat. No. 8,592,562B2, U.S. Pat. No. 9,200,060B2, US20140154254A1, and U.S. Pat. No. 9,358,286A1.

[0192] Common Light Chain

[0193] Light chain mispairing needs to be avoided to generate homogenous preparations of bispecific IgGs. One way to achieve this is through the use of the common light chain principle, i.e. combining two binders that share one light chain but still have separate specificities. An exemplary method of enhancing the formation of a desired bispecific antibody from a mixture of monomers is by providing a common variable light chain to interact with each of the heteromeric variable heavy chain regions of the bispecific antibody. Compositions and methods of producing bispecific antibodies with a common light chain as disclosed in, e.g., U.S. Pat. No. 7,183,076B2, US20110177073A1, EP2847231A1, WO2016079081A1, and EP3055329A1, the contents of each of which is incorporated by reference herein.

[0194] CrossMab

[0195] Another option to reduce light chain mispairing is the CrossMab technology which avoids non-specific L chain mispairing by exchanging CH1 and CL domains in the Fab of one half of the bispecific antibody. Such crossover variants retain binding specificity and affinity, but make the two arms so different that L chain mispairing is prevented. The CrossMab technology (as reviewed in Klein et al. Supra) involves domain swapping between heavy and light chains so as to promote the formation of the correct pairings. Briefly, to construct a bispecific IgG-like CrossMab antibody that could bind to two antigens by using two distinct light chain-heavy chain pairs, a two-step modification process is applied. First, a dimerization interface is engineered into the C-terminus of each heavy chain using a heterodimerization approach, e.g., Knob-into-hole (KiH) technology, to ensure that only a heterodimer of two distinct heavy chains from one antibody (e.g., Antibody A) and a second antibody (e.g., Antibody B) is efficiently formed. Next, the constant heavy 1 (CH1) and constant light (CL) domains of one antibody are exchanged (Antibody A), keeping the variable heavy (VH) and variable light (VL) domains consistent. The exchange of the CHa and CL domains ensured that the modified antibody (Antibody A) light chain would only efficiently dimerize with the modified antibody (antibody A) heavy chain, while the unmodified antibody (Antibody B) light chain would only efficiently dimerize with the unmodified antibody (Antibody B) heavy chain; and thus only the desired bispecific CrossMab would be efficiently formed (see e.g., Cain, C. SciBX 4(28); doi:10.1038/scibx.2011.783, the contents of which are incorporated by reference herein).

[0196] Common Heavy Chain

[0197] An exemplary method of enhancing the formation of a desired bispecific antibody from a mixture of monomers is by providing a common variable heavy chain to interact with each of the heteromeric variable light chain regions of the bispecific antibody. Compositions and methods of producing bispecific antibodies with a common heavy chain are disclosed in, e.g., US20120184716, US20130317200, and US20160264685A1, the contents of each of which is incorporated by reference herein.

[0198] Amino Acid Modifications

[0199] Alternative compositions and methods of producing multispecific antibodies with correct light chain pairing include various amino acid modifications. For example, Zymeworks describes heterodimers with one or more amino acid modifications in the CH1 and/or CL domains, one or more amino acid modifications in the VH and/or VL domains, or a combination thereof, which are part of the interface between the light chain and heavy chain and create preferential pairing between each heavy chain and a desired light chain such that when the two heavy chains and two light chains of the heterodimer pair are co-expressed in a cell, the heavy chain of the first heterodimer preferentially pairs with one of the light chains rather than the other (see e.g., WO2015181805). Other exemplary methods are described in WO2016026943 (Argen-X), US20150211001, US20140072581A1, US20160039947A1, and US20150368352.

[0200] Lambda/Kappa Formats

[0201] Multispecific molecules (e.g., multispecific antibody molecules) that include the lambda light chain polypeptide and a kappa light chain polypeptides, can be used to allow for heterodimerization. Methods for generating bispecific antibody molecules comprising the lambda light chain polypeptide and a kappa light chain polypeptides are disclosed in PCT Publication No. WO2018057955 (corresponding to PCT/US17/53053, filed on Sep. 22, 2017), incorporated herein by reference in its entirety.

[0202] In embodiments, the multispecific molecules includes a multispecific antibody molecule, e.g., an antibody molecule comprising two binding specificities, e.g., a bispecific antibody molecule. The multispecific antibody molecule includes:

a lambda light chain polypeptide 1 (LLCP1) specific for a first epitope;
a heavy chain polypeptide 1 (HCP1) specific for the first epitope;
a kappa light chain polypeptide 2 (KLCP2) specific for a second epitope; and
a heavy chain polypeptide 2 (HCP2) specific for the second epitope.

[0203] “Lambda light chain polypeptide 1 (LLCP1)”, as that term is used herein, refers to a polypeptide comprising sufficient light chain (LC) sequence, such that when combined with a cognate heavy chain variable region, can mediate specific binding to its epitope and complex with an HCP1. In an embodiment it comprises all or a fragment of a CH1 region. In an embodiment, an LLCP1 comprises LC-CDR1, LC-CDR2, LC-CDR3, FR1, FR2, FR3, FR4, and CHa, or sufficient sequence therefrom to mediate specific binding of its epitope and complex with an HCP1. LLCP1, together with its HCP1, provide specificity for a first epitope (while KLCP2, together with its HCP2, provide specificity for a second epitope). As described elsewhere herein, LLCP1 has a higher affinity for HCP1 than for HCP2.

[0204] “Kappa light chain polypeptide 2 (KLCP2)”, as that term is used herein, refers to a polypeptide comprising sufficient light chain (LC) sequence, such that when combined with a cognate heavy chain variable region, can mediate specific binding to its epitope and complex with an HCP2. In an embodiments it comprises all or a fragment of a CH1 region. In an embodiment, a KLCP2 comprises LC-CDR1, LC-CDR2, LC-CDR3, FR1, FR2, FR3, FR4, and CH1, or sufficient sequence therefrom to mediate specific binding of its epitope and complex with an HCP2. KLCP2, together with its HCP2, provide specificity for a second epitope (while LLCP1, together with its HCP1, provide specificity for a first epitope).

[0205] “Heavy chain polypeptide 1 (HCP1)”, as that term is used herein, refers to a polypeptide comprising sufficient heavy chain (HC) sequence, e.g., HC variable region sequence, such that when combined with a cognate LLCP1, can mediate specific binding to its epitope and complex with an HCP1. In an embodiments it comprises all or a fragment of a CH1 region. In an embodiment, it comprises all or a fragment of a CH2 and/or CH3 region. In an embodiment an HCP1 comprises HC-CDR1, HC-CDR2, HC-CDR3, FR1, FR2, FR3, FR4, CH1, CH2, and CH3, or sufficient sequence therefrom to: (i) mediate specific binding of its epitope and complex with an LLCP1, (ii) to complex preferentially, as described herein to LLCP1 as opposed to KLCP2; and (iii) to complex preferentially, as described herein, to an HCP2, as opposed to another molecule of HCP1. HCP1, together with its LLCP1, provide specificity for a first epitope (while KLCP2, together with its HCP2, provide specificity for a second epitope).

[0206] “Heavy chain polypeptide 2 (HCP2)”, as that term is used herein, refers to a polypeptide comprising sufficient heavy chain (HC) sequence, e.g., HC variable region sequence, such that when combined with a cognate LLCP1, can mediate specific binding to its epitope and complex with an HCP1. In some embodiments it comprises all or a fragment of a CH1 region. In some embodiments it comprises all or a fragment of a CH2 and/or CH3 region. In an embodiment an HCP1 comprises HC-CDR1, HC-CDR2, HC-CDR3, FR1, FR2, FR3, FR4, CH1, CH2, and CH3, or sufficient sequence therefrom to: (i) mediate specific binding of its epitope and complex with an KLCP2, (ii) to complex preferentially, as described herein to KLCP2 as opposed to LLCP1; and (iii) to complex preferentially, as described herein, to an HCP1, as opposed to another molecule of HCP2. HCP2, together with its KLCP2, provide specificity for a second epitope (while LLCP1, together with its HCP1, provide specificity for a first epitope).

[0207] In some embodiments of the multispecific antibody molecule disclosed herein:

LLCP1 has a higher affinity for HCP1 than for HCP2; and/or
KLCP2 has a higher affinity for HCP2 than for HCP1.

[0208] In embodiments, the affinity of LLCP1 for HCP1 is sufficiently greater than its affinity for HCP2, such that under preselected conditions, e.g., in aqueous buffer, e.g., at pH 7, in saline, e.g., at pH 7, or under physiological conditions, at least 75, 80, 90, 95, 98, 99, 99.5, or 99.9% of the multispecific antibody molecule molecules have a LLCP1 complexed, or interfaced with, a HCP1.

[0209] In some embodiments of the multispecific antibody molecule disclosed herein:

the HCP1 has a greater affinity for HCP2, than for a second molecule of HCP1; and/or
the HCP2 has a greater affinity for HCP1, than for a second molecule of HCP2.

[0210] In embodiments, the affinity of HCP1 for HCP2 is sufficiently greater than its affinity for a second molecule of HCP1, such that under preselected conditions, e.g., in aqueous buffer, e.g., at pH 7, in saline, e.g., at pH 7, or under physiological conditions, at least 75%, 80, 90, 95, 98, 99 99.5 or 99.9% of the multispecific antibody molecule molecules have a HCP1 complexed, or interfaced with, a HCP2.

[0211] In another aspect, disclosed herein is a method for making, or producing, a multispecific antibody molecule. The method includes:

(i) providing a first heavy chain polypeptide (e.g., a heavy chain polypeptide comprising one, two, three or all of a first heavy chain variable region (first VH), a first CH1, a first heavy chain constant region (e.g., a first CH2, a first CH3, or both));
(ii) providing a second heavy chain polypeptide (e.g., a heavy chain polypeptide comprising one, two, three or all of a second heavy chain variable region (second VH), a second CH1, a second heavy chain constant region (e.g., a second CH2, a second CH3, or both));
(iii) providing a lambda chain polypeptide (e.g., a lambda light variable region (VLU), a lambda light constant chain (VL), or both) that preferentially associates with the first heavy chain polypeptide (e.g., the first VH); and
(iv) providing a kappa chain polypeptide (e.g., a lambda light variable region (VLK), a lambda light constant chain (VLK), or both) that preferentially associates with the second heavy chain polypeptide (e.g., the second VH),
under conditions where (i)-(iv) associate.

[0212] In embodiments, the first and second heavy chain polypeptides form an Fc interface that enhances heterodimerization.

[0213] In embodiments, (i)-(iv) (e.g., nucleic acid encoding (i)-(iv)) are introduced in a single cell, e.g., a single mammalian cell, e.g., a CHO cell. In embodiments, (i)-(iv) are expressed in the cell.

[0214] In embodiments, (i)-(iv) (e.g., nucleic acid encoding (i)-(iv)) are introduced in different cells, e.g., different mammalian cells, e.g., two or more CHO cell. In embodiments, (i)-(iv) are expressed in the cells.

[0215] In one embodiments, the method further comprises purifying a cell-expressed antibody molecule, e.g., using a lambda- and/or-kappa-specific purification, e.g., affinity chromatography.

[0216] In embodiments, the method further comprises evaluating the cell-expressed multispecific antibody molecule. For example, the purified cell-expressed multispecific antibody molecule can be analyzed by techniques known in the art, include mass spectrometry. In one embodiment, the purified cell-expressed antibody molecule is cleaved, e.g., digested with papain to yield the Fab moieties and evaluated using mass spectrometry.

[0217] In embodiments, the method produces correctly paired kappa/lambda multispecific, e.g., bispecific, antibody molecules in a high yield, e.g., at least 75%, 80, 90, 95, 98, 99 99.5 or 99.9%.

[0218] In other embodiments, the multispecific, e.g., a bispecific, antibody molecule that includes:

(i) a first heavy chain polypeptide (HCP1) (e.g., a heavy chain polypeptide comprising one, two, three or all of a first heavy chain variable region (first VH), a first CH1, a first heavy chain constant region (e.g., a first CH2, a first CH3, or both)), e.g., wherein the HCP1 binds to a first epitope;
(ii) a second heavy chain polypeptide (HCP2) (e.g., a heavy chain polypeptide comprising one, two, three or all of a second heavy chain variable region (second VH), a second CH1, a second heavy chain constant region (e.g., a second CH2, a second CH3, or both)), e.g., wherein the HCP2 binds to a second epitope;
(iii) a lambda light chain polypeptide (LLCP1) (e.g., a lambda light variable region (VLl), a lambda light constant chain (VLl), or both) that preferentially associates with the first heavy chain polypeptide (e.g., the first VH), e.g., wherein the LLCP1 binds to a first epitope; and
(iv) a kappa light chain polypeptide (KLCP2) (e.g., a lambda light variable region (VLk), a lambda light constant chain (VLk), or both) that preferentially associates with the second heavy chain polypeptide (e.g., the second VH), e.g., wherein the KLCP2 binds to a second epitope.

[0219] In embodiments, the first and second heavy chain polypeptides form an Fc interface that enhances heterodimerization. In embodiments, the multispecific antibody molecule has a first binding specificity that includes a hybrid VLl-CLl heterodimerized to a first heavy chain variable region connected to the Fc constant, CH2-CH3 domain (having a knob modification) and a second binding specificity that includes a hybrid VLk-CLk heterodimerized to a second heavy chain variable region connected to the Fc constant, CH2-CH3 domain (having a hole modification).

### CD33-Targeting Antigen Binding Domains

[0220] The present disclosure provides, inter alia, multispecific (e.g., bi-, tri-, tetra-specific) or multifunctional molecules, that include, e.g., are engineered to contain, one or more antigen binding domains that bind to CD33. In another aspect, provided herein are anti-CD33 antibody molecules, e.g., monoclonal anti-CD33 antibody molecules.

[0221] In some embodiments, provided herein is an antibody molecule that comprises an anti-CD33 antigen binding domain. In some embodiments, the anti-CD33 antigen binding domain comprises any CDR sequence, framework region (FWR) sequence, or variable region sequence disclosed in Tables 5 and 6, or a sequence with at least 80%, 85%, 90%, 92%, 95%, 97%, 98%, or 99% identity thereto. Additional exemplary anti-CD33 antigen binding domain sequences are disclosed in WO2004043344; WO2007014743; WO2010037838; WO2011036183; WO2012074097; WO2013173496; WO2015067570; WO2015089344; WO2016201389; WO2017180768, herein incorporated by reference in their entireties.

[0222] In some embodiments, the antibody molecule that comprises the anti-CD33 antigen binding domain further comprises an immune cell engager, e.g., an immune cell engager disclosed herein. In some embodiments, the antibody molecule that comprises the anti-CD33 antigen binding domain further comprises a cytokine molecule, e.g., a cytokine molecule disclosed herein. In some embodiments, the antibody molecule that comprises the anti-CD33 antigen binding domain further comprises an immune cell engager and a cytokine molecule.

[0223] In some embodiments, the immune cell engager mediates binding to, and/or activation of, an immune cell, e.g., an immune effector cell. In some embodiments, the immune cell is chosen from a T cell, an NK cell, a B cell, a dendritic cell, or a macrophage cell engager, or a combination thereof. In some embodiments, the immune cell engager can be an antibody molecule, a ligand molecule (e.g., a ligand that further comprises an immunoglobulin constant region, e.g., an Fc region), a small molecule, or a nucleotide molecule.

[0224] In some embodiments, the immune cell engager is a T cell engager, e.g., a T cell engager disclosed herein, e.g., an antigen binding domain or ligand that binds to (e.g., and in some embodiments activates) one or more of the variable chain of the beta subunit of a TCR (e.g., TCRvβ), CD3, TCRα, TCRβ, TCRγ, TCRζ, ICOS, CD28, CD27, HVEM, LIGHT, CD40, 4-1BB, OX40, DR3, GITR, CD30, TIM1, SLAM, CD2, or CD226. In other embodiments, the T cell engager is selected from an antigen binding domain or ligand that binds to and does not activate one or more of TCRvβ, CD3, TCRα, TCRβ, TCRγ, TCRζ, ICOS, CD28, CD27, HVEM, LIGHT, CD40, 4-1BB, OX40, DR3, GITR, CD30, TIM1, SLAM, CD2, or CD226. In some embodiments, the T cell engager binds to TCRvβ, e.g., a TCRvβ subfamily disclosed in Tables 8A-1 and/or 8B-1. Exemplary sequences of anti-TCRvβ antibody molecules or antigen binding domains are disclosed in Tables 1A, 2A, 3A, 10A, 11A, 12A, and 13A. In some embodiments, the T cell engager is an anti-TCRvβ antibody molecule comprising one, two, or three HC CDRs and/or one, two, or three LC CDRs disclosed in Tables 1A, 2A, 3A, 10A, 11A, 12A, and 13A (e.g., one, two, or three HC CDRs and/or one, two, or three LC CDRs disclosed in SEQ ID NO: 1326, 1327, 1328, 1329, 1330, 1331, 1332, 1333, 1334, 1335, 1336, 110, 1337, 140, 143, 1343, 1338, 1339, 1340, 1341, or 1342). In some embodiments, the T cell engager is an anti-TCRvβ antibody molecule comprising a VH and/or a VL disclosed in Tables 1A, 2A, 3A, 10A, 11A, 12A, and 13A (e.g., a VH and/or a VL disclosed in SEQ ID NO: 1326, 1327, 1328, 1329, 1330, 1331, 1332, 1333, 1334, 1335, 1336, 110, 1337, 140, 143, 1343, 1338, 1339, 1340, 1341, or 1342), or a sequence with at least 80%, 85%, 90%, 92%, 95%, 97%, 98%, or 99% identity thereto. In some embodiments, the T cell engager is an anti-TCRvβ antibody molecule comprising a scFv disclosed in Tables 1A, 2A, 3A, 10A, 11A, 12A, and 13A (e.g., SEQ ID NO: 1326, 1327, 1328, 1329, 1330, 1331, 1332, 1333, 1334, 1335, 1336, 110, 1337, 140, 143, 1343, 1338, 1339, 1340, 1341, or 1342), or a sequence with at least 80%, 85%, 90%, 92%, 95%, 97%, 98%, or 99% identity thereto.

[0225] Exemplary antibody molecules that bind to CD33 and TCRvβ are disclosed in Table 5. In some embodiments, the multifunctional molecule comprises a CDR, VH, and/or VL of an anti-CD33 antigen binding domain disclosed in Table 5, or a sequence with at least 80%, 85%, 90%, 92%, 95%, 97%, 98%, or 99% identity thereto; a CDR, VH, VL, and/or scFv of an anti-TCRvβ antigen binding domain disclosed in Table 5, or a sequence with at least 80%, 85%, 90%, 92%, 95%, 97%, 98%, or 99% identity thereto; and/or an IL-2 molecule disclosed in Table 5, or a sequence with at least 80%, 85%, 90%, 92%, 95%, 97%, 98%, or 99% identity thereto. In some embodiments, the anti-CD33 antigen binding domain comprises a Fab region comprising a VH and a VL. In some embodiments, the anti-TCRvβ antigen binding domain comprises a scFv region. In some embodiments, the anti-TCRvβ antigen binding domain (e.g., the scFv region) is linked to the anti-CD33 antigen binding domain (e.g., the VH of the Fab region, e.g., the N-terminus of the VH of the Fab region) through a linker. In some embodiments, the linker comprises Gly and Ser. In some embodiments, the linker comprises an amino acid sequence chosen from SEQ ID NOs: 42-45 or 75-78.

TABLE 5
Exemplary molecules that bind to CD33 and TCRvβ (CD33 X TCRvβ) as well as exemplary
anti-CD33 x TCRvβ molecules that are further fused to IL2 (CD33 x TCRvβ x IL2)

| Molecule | | chain 1 variable | | chain 2 variable domain |
|---|---|---|---|---|
| name | chain 1 | domain sequence* | chain 2 | sequence** |
| BJM1166 | a_hTCRv | QVQLVQSGAEVKKPGSSVKVSCKA | a_hCD33_ | DIQMTQSPSSLSASV |
| | 66- | SGHDFRLTYIHWVRQAPGQGLEW | M195_VL | GDRVTITCRASESVD |
| | 5_BJM08 | MGRISAGSGNVKYNEKFKGRVTIT | | NYGISFMNWFQQKP |
| | 94scFv/a_ | ADTSTSTAYMELSSLRSEDTAVYY | | GKAPKLLIYAASNQ |
| | hCD33_ | CAVSYYSYDVLDYWGQGTTVTVS | | GSGVPSRFSGSGSGT |
| | M195_FA | SGGGGSGGGGSGGGGSGGGGSDIQ | | DFTLTISSLQPDDFA |
| | B | MTQSPSFLSASVGDRVTITCKASQN | | TYYCQQSKEVPWTF |
| | | VADRVAWYQQKPGKAPKALIYSSS | | GQGTKVEIK (SEQ |
| | | HRYKGVPSRFSGSGSGTEFTLTISSL | | ID NO: 268) |
| | | QPEDFATYFCQQFKSYPLTFGQGT | | |
| | | KLEIKGGGGSQVQLVQSGAEVKKP | | |
| | | GSSVKVSCKASGYTFTDYNMHWV | | |
| | | RQAPGQGLEWIGYIYPYNGGTGYN | | |
| | | QKFKSKATITADESTNTAYMMSSL | | |
| | | RSEDTAVYYCARGRPAMDYWGQG | | |
| | | TLVTVSS (SEQ ID NO: 267) | | |
| BJM0901 | BJM0498_ | QVQLVQSGAEVKKPGSSVKVSCKA | a_hCD33_ | DIQMTQSPSSLSASV |
| | scFv_h | SGTDFKLTYIHWVRQAPGQGLEW | M195_VL | GDRVTITCRASESVD |
| | M195_FA | MGRIFPGSGNVKYNEKIKGRVTIT | | NYGISFMNWFQQKP |
| | B | ADTSTSTAYMELSSLRSEDTAVYY | | GKAPKLLIYAASNQ |
| | | CAGSYYSYDVLDYWGQGTTVTVS | | GSGVPSRFSGSGSGT |
| | | SGGGGSGGGGSGGGGSGGGGSDIQ | | DFTLTISSLQPDDFA |
| | | MTQSPSFLSASVGDRVTITCKASQN | | TYYCQQSKEVPWTF |
| | | VDNRVAWYQQKPGKAPKALIYSSS | | GQCIKVMK (SEQ |
| | | HRYKGVPSRFSGSGSGTEFTLTISSL | | ID NO: 268) |
| | | QPEDFATYFCQQFKSYPLTFGQGT | | |
| | | KLEIKGGGGSQVQLVQSGAEVKKP | | |
| | | GSSVKVSCKASGYTFTDYNMHWV | | |
| | | RQAPGQGLEWIGYIYPYNGGTGYN | | |
| | | QKFKSKATITADESTNTAYMELSSL | | |
| | | RSEDTAVYYCARGRPAMDYWGQG | | |
| | | TLVTVSS (SEQ ID NO: 269) | | |
| BJM0913 | BJM0502_ | QVQLVQSGAEVKKPGSSVKVSCKA | a_hCD33_ | DIQMTQSPSSLSASV |
| | _scFv_h | SGHDFHLWYIHWVRQAPGQGLEW | M195_VL | GDRVTITCRASESVD |
| | M195_FA | MGRVSAGSGNVKYNEKEKGRVTIT | | NYGISFMNWFQQKP |
| | B | ADISTSTAYMELSSLRSEDTAVYY | | GKAPKLLIYAASNQ |
| | | CAGSYYSYDVLDYWGQGTTVTVS | | GSGVPSRFSGSGSGT |
| | | SGGGGSGGGGSGGGGSGGGGSDIQ | | DFTLTISSLQPDDFA |
| | | MTQSPSFLSASVGDRVTITCKASQN | | TYYCQQSKEVPWTF |
| | | VDNKVAWHQQKPGKAPKALIYSSS | | GQGTKVIIK (SEQ |
| | | HRYKGVPSRFSGSGSGTEFTLTISSL | | ID NO: 268) |
| | | QPEDFATYFCQQFKSYPLTFGQGT | | |
| | | KLEIKGGGGSQVQLVQSGAEVKKP | | |
| | | GSSVKVSCKASGYTFTDYNMHWV | | |
| | | RQAPGQGLEWIGYIYPYNGGTGYN | | |
| | | QKFKSKATITADESTNTAYMELSSL | | |
| | | RSEDTAVYYCARGRPAMDYWGQG | | |
| | | TLVTVSS (SEQ ID NO: 270) | | |
| BJM0387 | TSP/huM | QVQLYQSGAEVKKPQSSVKVSCKA | a_hCD33_ | DIQMTQSPSSLSASV |
| | 195_HC | SGYSFTTYYIHWVRQAPGQGLEW | M195_VL | GDRVTITCRASESVD |
| | N- | MGWFFPGSGNIKYNEKFKGRVTIT | | NYGISFMNWFQQKP |
| | terminal_s | ADTSTSTAYMELSSLRSEDTAVYY | | GKAPKLLIYAASNQ |
| | cFv_(VH- | CAGSYYSYDVLDYWGQGTTVTVS | | GSGVPSRFSGSGSGT |
| | VL) | SGGGGSGGGGSGGGGSGGGGSDIQ | | DFTLTISSLQPDDFA |
| | | MTQSPSELSASYGDRVIITCKASQN | | TYYCQQSKEVPWTF |
| | | VGINVVWHQQKPGKAPKALIYSSS | | GQGTKVEIK (SEQ |
| | | HRYSGVPSRFSGSGSGTEFTLTISSL | | ID NO: 268) |
| | | QPEDFATYFCQQFKSYPLTFGQGT | | |
| | | KLEIKGGGGSQVQLVQSGAEVKKP | | |
| | | GSSVKVSCKASGYTFTDYNMHWV | | |
| | | RQAPGQGLEWIGYIYPYNGGTGYN | | |
| | | QKFKSKATITADESTNTAYMELSSL | | |
| | | RSEDTAVYYCARGRPAMDYWGQG | | |
| | | TLVTVSS (SEQ ID NO: 271) | | |
| BJM1168 | a_hTCRv | QVQLYESGGGYVQPGRSLRLSCAA | a_hCD33_ | DIQMTQSPSSLSASV |
| | b_h16G8 | SGFTFSNFGMHWVRQAPGKGLEWV | M195_VL | GDRVTITCRASESVD |
| | BHM168 | AYISSGSSTIYYADTLKGRFTISR | | NYGISFMNWFQQKP |
| | 0_scFv_a | DNSKNTLYLQMNSLRAEDTAVYYC | | GKAPKLLIYAASNQ |
| | _hCD33_ | ARRGEGAMDYWQQQTTVIVSSGGG | | GSGVPSRFSGSGSGT |
| | M195_V | GSGGGGSGGGGSGGGGSDNQLIQ | | DFTLTISSLQPDDFA |
| | H | SPSFLSASVGDRVTITCRASSSVN | | TYYCQQSKEVPWTF |
| | | YIYWYQQKPGKAPKLLIYYTSNLAP | | GQGTKVEIK (SEQ |
| | | GVPSRFSGSGSGNEYTLTISSLQPE | | ID NO: 268) |
| | | DFATYYCQQFTSSPFTFGQGTKLEI | | |
| | | KGGGGSQVQLVQSGAEVKKPGSS | | |
| | | VKVSCKASGYTFTDYNMHWVRQA | | |
| | | PGQGLEWIGYIYPYNGGTGYNQKF | | |
| | | KSKATITADESTNTAYMELSSLRSE | | |
| | | DTAVYYCARGRPAMDYWGQGTL | | |
| | | VTVSS (SEQ ID NO: 272) | | |
| BJM0697 | a_hTCRv | QVQLVQSGAEVKKPGSSVKVSCKA | a_hCD33_ | DIQMTQSPSSLSASV |
| | b6- | SGYSFTTYYIHWVRQAPGQGLEW | huM195_ | GDRVTITCRASESVD |
| | 5_scFv_b | MGWEEPGSGNIKYNEKEKGRVTIT | VL- | NYGISFMNWFQQKP |
| | uM195 | ADTSTSTAYMELSSLRSEDTAVYY | hCLIg_ | GKAPKLLIYAASNQ |
| | HC | CAGSYYSYDVLDYWGQGTTVTVS | vk | GSGVPSRFSGSGSGT |
| | | SGGGGSGGGGSGGGGSGGGGSDIQ | hIL2_ | DFTLTISSLQPDDFA |
| | | MTQSPSFLSASVGDRVTITCKASQN | F42A_ | TYYCQQSKEVPWTF |
| | | VGINVVWHQOKFGKAPKALIYSSS | VGA | GQGTKVEIKRTVAA |
| | | HRYSGVPSRFSGSGSGTEFTLTISSL | d(7-9) | PSVFIFPPSDEQLKSG |
| | | QPEDFATYFCQQFKSYPLTFGQGT | | TASVVCLLNNFYPR |
| | | KLEIKGGGGSQVQLVQSGAEVKKP | | EAKVQWKVDNALQ |
| | | GSSVKVSCKASGYTFTDYNMHWV | | SGNSQESVTEQDSK |
| | | RQAPGQGLEWIGYIYPYNGGTGYN | | DSTYSLSSTLTLSKA |
| | | QKFKSKATITADESTNTAYMELSSL | | DYEKHKVYACEVT |
| | | RSEDTAVYYCARGRPAMDYWGQG | | HQGLSSPVTKSFNR |
| | | TLVTVSS (SEQ ID NO: 271) | | GECGGGGSGGGGSG |
| | | | | GGGSAPTSSSTQLQL |
| | | | | EHLLLDLQMIINGIN |
| | | | | NYKNPKLTRMLTAK |
| | | | | FAMPKKATELKHLQ |
| | | | | CLEEELKPLEEVLNL |
| | | | | AQSKNFHLRPRDLIS |
| | | | | NINVIVLELKGSETT |
| | | | | FMCEYADETATIVE |
| | | | | FLNRWITFCQSIISTL |
| | | | | T (SEQ ID NO: 273) |

*The anti-TCRvp scFv sequences are underlined.
**This column shows the variable domain sequences of chain 2 except for BJM0697. SEQ ID NO: 273 shows a full-length sequence comprising an anti-CD33 VL, a CL, and an IL2 fragment.

[0226] In some embodiments, the immune cell engager is a NK cell engager, e.g., a NK cell engager disclosed herein, e.g., an antigen binding domain or ligand that binds to (e.g., activates): NKp30, NKp40, NKp44, NKp46, NKG2D, DNAM1, DAP10, CD16 (e.g., CD16a, CD16b, or both), CRTAM, CD27, PSGL1, CD96, CD100 (SEMA4D)), NKp80, CD244 (also known as SLAMF4 or 2B34), SLAMF6, SLAMF7, KIR2DS2, KIR2DS4, KIR3DS1, KIR2DS3, KIR2DS5, KIR2DS1, CD94, NKG2C, NKG2E, or CD160. In some embodiments, the NK cell engager is an antigen binding domain that binds to NKp30. In some embodiments, the NK cell engager is an antigen binding domain that comprises any CDR amino acid sequence, framework region (FWR) amino acid sequence, or variable region amino acid sequence disclosed in Tables 7-10, or a sequence with at least 80%, 85%, 90%, 92%, 95% 97% 98%, or 99% identity thereto.

[0227] Exemplary antibody molecules that bind to CD33 and NKp30 are disclosed in Table 6. In some embodiments, the multifunctional molecule comprises a CDR, VH, and/or VL of an anti-CD33 antigen binding domain disclosed in Table 5, or a sequence with at least 80%, 85%, 90%, 92%, 95%, 97%, 98%, or 99% identity thereto; a CDR, VH, VL, and/or scFv of an anti-NKp3 antigen binding domain disclosed in Table 5, or a sequence with at least 80%, 85%, 90%, 92%, 95%, 97%, 98%, or 99% identity thereto; and/or an IL-2 molecule disclosed in Table 5, or a sequence with at least 80%, 85%, 90%, 92%, 95%, 97%, 98%, or 990% identity thereto.

TABLE 6
Exemplary molecules that bind to CD33 and NKp30 (CD33 X NKp30) as well as exemplary
anti-CD33 x NKp30 molecules that are further fused to IL2 (CD33 x NKp30 x IL2)

| Molecule | | chain 1 sequence | | chain 2 | | chain 3 sequence |
|---|---|---|---|---|---|---|
| name | chain 1 | (hole) | chain 2 | sequence | chain 3 | (knob)* |
| BJM10 | hM195 | QVQLVQSGAEVKK | ahCD | DIQMTQSP | a_hNKp3 | EIQLLESGGGLY |
| 18 | VH- | PGSSVKVSCKASG | 33_M1 | SSLSASVG | 0_BJM04 | QPGGSLRLSCAV |
| | hCHIgG | YTFTDYNMHWVR | 95_VL | DRVTITCR | 11_scFv( | SGFSITTTGYHW |
| | 1_hole_ | QAPGQGLEWIGYI | | ASESVDN | VH/VL)- | NWVRQAPGKGL |
| | cys_N2 | YPYNGGTGYNQKF | | YGISFMN | hFc_Knob | EWVGYIYSSGST |
| | 97A | KSKATITADESTNT | | WFQQKPG | _Cys_H43 | SYNPSLKSRFTIS |
| | | AYMELSSLRSEDT | | KAPKLLIY | 5R_Y436 | RDTSKNTFYLQ |
| | | AVYYCARGRPAM | | AASNQGS | F_N297A | MNSLRAEDTAV |
| | | DYWGQGTLVTVSS | | GVPSRFSG | | YYCARGDWHYF |
| | | ASTKGPSVFPLAPS | | SGSGTDFT | | DYWGQGTMVT |
| | | SKSTSGGTAALGC | | LTISSLQP | | VSSGGGGSGGG |
| | | LVKDYFPEPVTVS | | DDFATYY | | GSGGGGSGGGG |
| | | WNSGALTSGVHTF | | CQQSKEV | | SDSVTTQSPLSLP |
| | | PAVLQSSGLYSLSS | | PWTFGQG | | VTLGQPASISCS |
| | | VVTVPSSSLGTQT | | TKVEIK | | GEKLSDKYVHW |
| | | YICNVNHKPSNTK | | (SEQ ID | | YQQRPGQSPRM |
| | | VDKRVEPKSCDKT | | NO: 268) | | LIYENDRRESGY |
| | | HTCPPCPAPELLGG | | | | PDRESGSNSGND |
| | | PSVFLIPPKPKDTL | | | | ATLKISRVEAED |
| | | MISRTPEVTCVVV | | | | VGVYFCQFWDS |
| | | DVSHEDPEVKFNW | | | | TNSAVFGGGTK |
| | | YVDGVEVHNAKT | | | | VEIKGGGGSDKT |
| | | KPREEQYASTYRV | | | | HTCPPCPAPELL |
| | | VSVLTVLHQDWLN | | | | GGPSVFLFPPKP |
| | | GKEYKCKVSNKAL | | | | KDTLMISRTPEV |
| | | PAPIEKTISKAKGQ | | | | TCVVVDVSHED |
| | | PREPQVCTLPPSRE | | | | PEVKFNWYVDG |
| | | EMTKNQVSLSCAV | | | | VEVHNAKTKPR |
| | | KGFYPSDIAVEWE | | | | EEQYASTYRVVS |
| | | SNGQPENNYKTTP | | | | VLTVLHQDWLN |
| | | PVLDSDGSFFLVSK | | | | GKEYKCKVSNK |
| | | LTVDKSRWQQGN | | | | ALPAPIEKTISKA |
| | | VFSCSVMHEALHN | | | | KGQPREPQVYTL |
| | | HYTQKSLSLSPGK | | | | PPCREEMTKNQ |
| | | (SEQ ID NO: | | | | VSLWCLVKGFY |
| | | 274) | | | | PSDIAVEWESNG |
| | | | | | | QPENNYKTTPPV |
| | | | | | | LDSDGSFFLYSK |
| | | | | | | LTVDKSRWQQG |
| | | | | | | NWSCSVMHEA |
| | | | | | | LHNRFTQKSLSL |
| | | | | | | SPGK (SEQ ID |
| | | | | | | NO: 275) |
| BJM10 | hM195 | QVQLVQSGAEVKK | ahCD | DIQMTQSP | a_hNKp3 | EIQLLESGGGLY |
| 20 | VH- | PGSSVKVSCKASG | 33_hu | SSLSASVG | 0_BJM04 | QPGGSLRLSCAV |
| | hCHIgG | YTFTDYNMHWVR | M195_ | DRVTITCR | 11_scFv | SGFSITTTGYHW |
| | 1_hole_ | QAPGQGLEWIGYI | VL- | ASESVDN | (VH/VL)- | NWVRQAPGKGL |
| | cys_N2 | YPYNGGTGYNQKF | hCLIg | YGISFMN | hFc_Knob | EWVGYIYSSGST |
| | 97A | KSKATITADESTNT | _vk- | WFQQKPG | _Cys_H43 | SYNPSLKSRFTIS |
| | | AYMELSSLRSEDT | hIL2_ | KAPKLLIY | 5R_Y436 | RDTSKNTFYLQ |
| | | AVYYCARGRPAM | F42A_ | AASNQGS | F_N297A | MNSLRAEDTAV |
| | | DYWGQGTLVTVSS | Y45A_ | GVPSRFSG | | YYCARGDWHYF |
| | | ASTKGPSVFPLAPS | d(7-9) | SGSGTDFT | | DYWGQGTMVT |
| | | SKSTSGGTAALGC | | LHSSLQP | | VSSGGGGSGGG |
| | | LVKDYFPEPVTVS | | DDFATYY | | GSGGGGSGGGG |
| | | WNSGALTSGVHTF | | CQQSKEV | | SDSVTTQSPLSLP |
| | | PAVLQSSGLYSLSS | | PWTFGQG | | VTLGQPASISCS |
| | | VVTVPSSSLGTQT | | TKVEIKRT | | GEKLSDKYVHW |
| | | YICNVNHKPSNTK | | VAAPSVFI | | YQQRPGQSPRM |
| | | VDKRVEPKSCDKT | | FPPSDEQL | | LIYENDRRESGY |
| | | HTCPPCPAPELLGG | | KSGTASV | | PDRESGSNSGND |
| | | PSVFLIPPKPKDTL | | VCLLNNF | | ATLKISRVEAED |
| | | MISRTPEVTCVVV | | YPREAKV | | VGVYFCQFWDS |
| | | DVSHEDPEVKFNW | | QWKVDN | | TNSAVFGGGTK |
| | | YVDGVEVHNAKT | | ALQSGNS | | VEIKGGGGSDKT |
| | | KPREEQYASTYRV | | QESVTEQ | | HTCPPCPAPELL |
| | | VSVLTVLHQDWLN | | DSKDSTY | | GGPSVFLFPPKP |
| | | GKEYKCKVSNKAL | | SLSSTLTL | | KDTLMISRTPEV |
| | | PAPIEKTISKAKGQ | | SKADYEK | | TCVVVDVSHED |
| | | PREPQVCTLPPSRE | | HKVYACE | | PEVKFNWYVDG |
| | | EMTKNQVSLSCAV | | VTHQGLS | | VEVHNAKTKPR |
| | | KGFYPSDIAVEWE | | SPVTKSFN | | EEQYASTYRVVS |
| | | SNGQPENNYKTTP | | RGECGGG | | VLTVLHQDWLN |
| | | PVLDSDGSFFLVSK | | GSGGGGS | | GKEYKCKVSNK |
| | | LTVDKSRWQQGN | | GGGGSAP | | ALPAPIEKTISKA |
| | | VFSCSVMHEALHN | | TSSSTQLQ | | KGQPREPQVYTL |
| | | HYTQKSLSLSPGK | | LEHLLLDL | | PPCREEMTKNQ |
| | | (SEQ ID NO: | | QMILNGIN | | VSLWCLVKGFY |
| | | 274) | | NYKNPKL | | PSDIAVEWESNG |
| | | | | TRMLTAK | | QPENNYKTTPPV |
| | | | | FAMPKKA | | LDSDGSFFLYSK |
| | | | | TELKHLQ | | LTVDKSRWQQG |
| | | | | CLEEELKP | | NWSCSVMHEA |
| | | | | LEEVLNL | | LHNRFTQKSLSL |
| | | | | AQSKNFH | | SPGK (SEQ ID |
| | | | | LRPRDLIS | | NO: 275) |
| | | | | NINVIVLE | | |
| | | | | LKGSETTF | | |
| | | | | MCEYADE | | |
| | | | | TATIVEFL | | |
| | | | | NRWITFC | | |
| | | | | QSIISTLT | | |
| | | | | (SEQ ID | | |
| | | | | NO: 273) | | |
| BJM11 | hM195_ | QVQLVQSGAEVKK | a_hCD | DIQMTQSP | a_hNKp3 | EIQLLESGGGLY |
| 69 | VH- | PGSSVKVSCKASG | 33 hu | SSLSASVG | 0_BJM04 | QPGGSLRLSCAV |
| | hCHIgG | YTFTDYNMHWVR | M195_ | DRVTITCR | 11_scFv | SGFSITTTGYHW |
| | 1_hole | QAPGQGLEWIGYI | VL- | ASESVDN | (VH/VL)- | NWVRQAPGKGL |
| | cys_N2 | YPYNGGTGYNQKF | hCLIg | YGISFMN | hFc_Knob | EWVGYIYSSGST |
| | 97A | KSKATITADESTNT | _vk- | WFQQKPG | _Cys_H43 | SYNPSLKSRFTIS |
| | | AYMELSSLRSEDT | hIL2_ | KAPKLLIY | 5R_Y436 | RDTSKNTFYLQ |
| | | AVYYCARGRPAM | F42A_ | AASNQGS | F_N297A | MNSLRAEDTAV |
| | | DYWGQGTLVTVSS | Y45A | GVPSRFSG | | YYCARGDWHYF |
| | | ASTKGPSVFPLAPS | | SGSGTDFT | | DYWGQGTMVT |
| | | SKSTSGGTAALGC | | LTISSLQP | | VSSGGGGSGGG |
| | | LVKDYFPEPVTVS | | DDFATYY | | GSGGGGSGGGG |
| | | WNSGALTSGVHTF | | CQQSKEV | | SDSVTTQSPLSLP |
| | | PAVLQSSGLYSLSS | | PWTFGQG | | VTLGQPASISCS |
| | | VVTVPSSSLGTQT | | TKVEIKRT | | GEKLSDKYVHW |
| | | YICNVNHKPSNTK | | VAAPSVFI | | YQQRPGQSPRM |
| | | VDKRVEPKSCDKT | | FPPSDEQL | | LIYENDRRESGY |
| | | HTCPPCPAPELLGG | | KSGTASV | | PDRESGSNSGND |
| | | PSVFLIPPKPKDTL | | VCLLNNF | | ATLKISRVEAED |
| | | MISRTPEVTCVVV | | YPREAKV | | VGVYFCQFWDS |
| | | DVSHEDPEVKFNW | | QWKVDN | | TNSAVFGGGTK |
| | | YVDGVEVHNAKT | | ALQSGNS | | VEIKGGGGSDKT |
| | | KPREEQYASTYRV | | QESVTEQ | | HTCPPCPAPELL |
| | | VSVLTVLHQDWLN | | DSKDSTY | | GGPSVFLFPPKP |
| | | GKEYKCKVSNKAL | | SLSSTLTL | | KDTLMISRTPEV |
| | | PAPIEKTISKAKGQ | | SKADYEK | | TCVVVDVSHED |
| | | PREPQVCTLPPSRE | | HKVYACE | | PEVKFNWYVDG |
| | | EMTKNQVSLSCAV | | VTHQGLS | | VEVHNAKTKPR |
| | | KGFYPSDIAVEWE | | SPVTKSFN | | EEQYASTYRVVS |
| | | SNGQPENNYKTTP | | RGECGGG | | VLTVLHQDWLN |
| | | PVLDSDGSFFLVSK | | GSGGGGS | | GKEYKCKVSNK |
| | | LTVDKSRWQQGN | | GGGGSAP | | ALPAPIEKTISKA |
| | | VFSCSVMHEALHN | | TSSSTKKT | | KGQPREPQVYTL |
| | | HYTQKSLSLSPGK | | QLQLEHL | | PPCREEMTKNQ |
| | | (SEQ ID NO: | | LIDLQMIL | | VSLWCLVKGFY |
| | | 274) | | NGINNYK | | PSDIAVEWESNG |
| | | | | NPKLTRM | | QPENNYKTTPPV |
| | | | | LTAKFAM | | LDSDGSFFLYSK |
| | | | | PKKATEL | | LTVDKSRWQQG |
| | | | | KHLQCLE | | NWSCSVMHEA |
| | | | | EELKPLEE | | LHNRFTQKSLSL |
| | | | | VLNLAQS | | SPGK (SEQ ID |
| | | | | KNFHLRP | | NO: 275) |
| | | | | RDLISNIN | | |
| | | | | VIVLELKG | | |
| | | | | SETTEMCE | | |
| | | | | YADETATI | | |
| | | | | VEFLNRW | | |
| | | | | ITFCQSIIS | | |
| | | | | TLT (SEQ | | |
| | | | | ID NO: 276) | | |
| | hM195 | QVQLVQSGAEVKK | a_hCD | DIQMTQSP | a_hNKp3 | EIQLLESGGGLY |
| | VH- | PGSSVKVSCKASG | 33_M1 | SSLSASVG | 0_BJM04 | QPGGSLRLSCAV |
| | hCHIgG | YTFTDYNMHWVR | 95_VL | DRVTITCR | 11_scFv( | SGFSITTTGYHW |
| | 1_hole_ | QAPGQGLEWIGYI | | ASESVDN | VH/VL)- | NWVRQAPGKGL |
| | cys | YPYNGGTGYNQKF | | YGISFMN | hFc_Knob | EWVGYIYSSGST |
| | | KSKATITADESTNT | | WFQQKPG | _Cys_H43 | SYNPSLKSRETS |
| | | AYMELSSLRSEDT | | KAPKLLIY | 5R_Y436 | RDTSKNTFYLQ |
| | | AVYYCARGRPAM | | AASNQGS | F | MNSLRAEDTAV |
| | | DYWGQGTLVTVSS | | GVPSRFSG | | YYCARGDWHYF |
| | | ASTKGPSVFPLAPS | | SGSGTDFT | | DYWGQGTMVT |
| | | SKSTSGGTAALGC | | LTISSLQP | | VSSGGGGSGGG |
| | | LVKDYFPEPVTVS | | DDFATYY | | GSGGGGSGGGG |
| | | WNSGALTSGVHTF | | CQQSKEV | | SDSVTTQSPLSLP |
| | | PAVLQSSGLYSLSS | | PWTFGQG | | VTLGQPASISCS |
| | | VVTVPSSSLGTQT | | TKVEIK | | GEKLSDKYVHW |
| | | YICNVNHKPSNTK | | (SEQ ID | | YQQRPGQSPRM |
| | | VDKRVEPKSCDKT | | NO: 268) | | LIYENDRRESGY |
| | | HTCPPCPAPELLGG | | | | PDRESGSNSGND |
| | | PSVFLIPPKPKDTL | | | | ATLKISRVEAED |
| | | MISRTPEVTCVVV | | | | VGVYFCQFWDS |
| | | DVSHEDPEVKFNW | | | | TNSAVFGGGTK |
| | | YVDGVEVHNAKT | | | | VEIKQGGGSDKT |
| | | KPREEQYNSTYRV | | | | HTCPPCPAPELL |
| | | VSVLTVLHQDWLN | | | | GGPSVFLIPPKP |
| | | GKEYKCKVSNKAL | | | | KDTLMISRTPEV |
| | | PAPIEKTISKAKGQ | | | | TCVVVDVSHED |
| | | PREPQVCTLPPSRE | | | | PEVKFNWYVDG |
| | | EMTKNQVSLSCAV | | | | VEVHNAKTKPR |
| | | KGFYPSDIAVEWE | | | | EEQYNSTYRVVS |
| | | SNGQPENNYKTTP | | | | VLTVLHQDWLN |
| | | PVLDSDGSFFLVSK | | | | GKEYKCKVSNK |
| | | LTVDKSRWQQGN | | | | ALPAPIEKTISKA |
| | | VFSCSVMHEALHN | | | | KGQPREPQVYTL |
| | | HYTQKSLSLSPGK | | | | PPCREEMTKNQ |
| | | (SEQ ID NO: | | | | VSLWCLVKGFY |
| | | 277) | | | | PSDIAVEWESNG |
| | | | | | | QPENNYKTTPPV |
| | | | | | | LDSDGSFFLYSK |
| | | | | | | LTVDKSRWQQG |
| | | | | | | NVFSCSVMHEA |
| | | | | | | LHNRFTQKSLSL |
| | | | | | | SPGK (SEQ ID |
| | | | | | | NO: 278) |
| BJM11 | ahCD3 | QVQLVQSGAEVKK | a_hCD | DIQMTQSP | hIL2_F42 | APTSSSTKKTQL |
| 51 | 3_huM1 | PGSSVKVSCKASG | 33_bu | SSLSASVG | A_Y45A_ | QIEHILLDLQMI |
| | 95 VH- | YTFTDYNMHWVR | Ml95_ | DRVTITCR | a_hNKp3 | LNGINNYKNPKL |
| | hCHIgG | QAPGQGLEWIGYI | VL- | ASESVDN | 0_BJM04 | TRMLTAKFAMP |
| | 1_knob_ | YPYNGGTGYNQKF | hCLIg | YGISFMN | 11 scFw | KKATELKHLQC |
| | cys_N2 | KSKATITADESTNT | _vk | WFQQKPG | VH/VL)- | LEEELKPLEEVL |
| | 97A | AYMELSSLRSEDT | | KAPKLLIY | hFc_Hole | NLAQSKNFHLRP |
| | | AVYYCARGRPAM | | AASNQGS | _sys_N29 | RDLISNINVIVLE |
| | | DYWGQGTLVTVSS | | GVPSRFSG | 7A | LKGSETTFMCEY |
| | | ASTKGPSVFPLAPS | | SGSGTDFT | | ADETATIVEFLN |
| | | SKSTSGGTAALGC | | LTISSLQP | | RWITFCQSIISTL |
| | | LVKDYFPEPVTVS | | DDFATYY | | TGGGGSGGGGS |
| | | WNSGALTSGVHTF | | CQQSKEV | | GGGGSEIQLLES |
| | | PAVLQSSGLYSLSS | | PWTFGQG | | QQGLVQPGGSL |
| | | VVTVPSSSLGTQT | | TKVEIKRT | | RLSCAVSGFSITT |
| | | YICNVNHKPSNTK | | VAAPSVFI | | TGYHWNWVRQ |
| | | VDKRVEPKSCDKT | | FPPSDEQL | | APGKGLEWVGY |
| | | HTCPPCPAPILLGG | | KSGTASV | | IYSSGSTSYNPSL |
| | | PSVFLFPPKPKDTL | | VCLLNNF | | KSRFTISRDTSKN |
| | | MISRTPEVTCVVV | | YPREAKV | | TGYLQMNSLRAE |
| | | DVSHEDPEVKFNW | | QWKVDN | | DTAVYYCARGD |
| | | YVDGVEVHNAKT | | ALQSGNS | | WHYFDYWGQG |
| | | KPREEQYASTYRV | | QESVTEQ | | TMVTVSSGGGG |
| | | VSVLTVLHQDWLN | | DSKDSTY | | SGGGGSGGGGS |
| | | GKEYKCKVSNKAL | | SLSSTLTL | | GGGQSDSYLLQS |
| | | PAPIEKTISKAKGQ | | SKADYEK | | PLSLPYILGQPA |
| | | PREPQVYTLPPCRE | | HKVYACE | | SISCSGEKLSDK |
| | | EMTKNQVSLWCL | | VTHQGLS | | YVHWYQQRPGQ |
| | | VKGFYPSDIAVEW | | SPVTKSFN | | SPRMLIYENDRR |
| | | ESNGQPENNYKTT | | RGEC (SEQ | | PSGVPDRFSGSN |
| | | PPVLDSDGSFFLYS | | ID NO: 280) | | SGNDATLKISRV |
| | | KLTVDKSRWQQG | | | | EAEDVGVYEGQ |
| | | NVFSCSVMHEALH | | | | FWDSTNSAVFG |
| | | NHYTQKSLSLSPG | | | | GGTKVEIKGGG |
| | | K (SEQ ID NO: | | | | GSDKTHTCPPCP |
| | | 279) | | | | APELLGGPSVFL |
| | | | | | | FPPKPKDTLMIS |
| | | | | | | RTPEVTCVVVD |
| | | | | | | VSHEDPEVKFN |
| | | | | | | WYVDGVEVHN |
| | | | | | | AKTKPREEQYAS |
| | | | | | | TYRVVSVLTVLH |
| | | | | | | QDWLNGKEYKC |
| | | | | | | KVSNKALPAPIE |
| | | | | | | KTISKAKGQPRE |
| | | | | | | PQVCTLPPSREE |
| | | | | | | MTKNQVSLSCA |
| | | | | | | VKGFYPSDIAVE |
| | | | | | | WESNGQPENNY |
| | | | | | | KTTPPVLDSDGS |
| | | | | | | FFLVSKLTVDKS |
| | | | | | | RWQQGNVFSCS |
| | | | | | | VMHEALHNHYT |
| | | | | | | QKSLSLSPGK |
| | | | | | | (SEQ ID NO: |
| | | | | | | 281) |
| BJM11 | a_hCD3 | QVQLVQSGAEVKK | a_hCD | DIQMTQSP | a_hNKp3 | EIQLLESGGGLV |
| 52 | 3_huM1 | PGSSVKVSCKASG | 33_hu | SSLSASVG | 0_BJM04 | QPGGSLRLSCAV |
| | 95_VH- | YTFTDYNMHWVR | M195_ | DRVTITCR | 11_scFv( | SGFSITTTQYHW |
| | hCHIgG | QAPGQGLEWIGYI | VL- | ASESVDN | VH/VL)_ | NWVRQAPGKGL |
| | 1_knob_ | YPYNGGTGYNQKF | hCLIg | YGISFMN | hIL2_F42 | EWVGYISSGST |
| | cys_N2 | KSKATITADESTNT | _vk | WFQQKPG | A_Y45A- | SYNPSLKSRFTIS |
| | 97A | AYMELSSLRSEDT | | KAPKLLIY | hFc_Hole | RDTSKNTFYLQ |
| | | AVYYCARGRPAM | | AASNQGS | _cys_N29 | MNSLRAEDTAV |
| | | DYWGQGTLVTVSS | | GVPSRFSG | 7A | YYCARGDWHYF |
| | | ASTKGPSVFPLAPS | | SGSGTDFT | | DYWGQQIMVI |
| | | SKSTSGGTAALGC | | LTISSLQP | | VSSGGGGSGGG |
| | | LVKDYFPEPVTVS | | DDFATYY | | GSGGGGSGGGG |
| | | WNSGALTSGVHTF | | CQQSKEV | | SDSVTTQSPLSLP |
| | | PAVLQSSGLYSLSS | | PWTFGQG | | VTLGQPASISCS |
| | | VVTVPSSSLGTQT | | TKVEIKRT | | GEKLSDKYVHW |
| | | YICNVNHKPSNTK | | VAAPSVFL | | YQQRPGQSERM |
| | | VDKRVEPKSCDKT | | FPPSDEQL | | LIYENDRRPSGV |
| | | HTCPPCPAPELLGG | | KSGTASV | | PDRFSGSNSGND |
| | | PSVFLFPPKPKDTL | | VCLLNNF | | ATLKISRVEAED |
| | | MISRTPEVTCVVV | | YPREAKV | | VQVYFCQFWDS |
| | | DVSHEDPEVKFNW | | QWKVDN | | TNSAVFGGGTK |
| | | YVDGVEVHNAKT | | ALQSGNS | | VEIKGGGGSGGG |
| | | KPREEQYASTYRV | | QESVTEQ | | GSGGGGSAPTSS |
| | | VSVLTVLHQDWLN | | DSKDSTY | | STKKTQLQLEHL |
| | | GKEYKCKVSNKAL | | SLSSTLTL | | LLDLQMILNGIN |
| | | PAPIEKTISKAKGQ | | SKADYEK | | NYKNPKLTRML |
| | | PREPQVYTIPPCRE | | HKVYACE | | TAKFAMPKKAT |
| | | EMTKNQVSLWCL | | VTHQGLS | | ELKHLQCLEEEL |
| | | VKGFYPSDIAVEW | | SPVTKSFN | | KPLEEVLNLAQS |
| | | ESNGQPENNYKTT | | RGEC (SEQ | | KNFHLRPRDLIS |
| | | PPVLDSDGSFFLYS | | ID NO: 280) | | NYNVIVLELKGSE |
| | | KLTVDKSRWQQG | | | | TTFMCEYADET |
| | | NVFSCSVMHEALH | | | | ATIVEFLNRWITE |
| | | NHYTQKSLSLSPG | | | | CQSIISTLTGGGG |
| | | K (SEQ ID NO: | | | | SDKTHTCPPCPA |
| | | 279) | | | | PELLGGPSVFLFP |
| | | | | | | PKPKDTLMISRT |
| | | | | | | PEVTCVVVDVS |
| | | | | | | HEDPEVKFNWY |
| | | | | | | VDGVEVHNAKT |
| | | | | | | KPREEQYASTYR |
| | | | | | | VVSVLTVLHQD |
| | | | | | | WLNGKEYKCKV |
| | | | | | | SNKALPAPIIKTI |
| | | | | | | SKAKGQPREPQV |
| | | | | | | CTLPPSREEMTK |
| | | | | | | NQVSISCAVKGF |
| | | | | | | YPSDIAVEWESN |
| | | | | | | GQPENNYKTTPP |
| | | | | | | VLDSDGSFFLVS |
| | | | | | | KLTVDKSRWQQ |
| | | | | | | GNVFSCSVMHE |
| | | | | | | ALHNHYTQKSLS |
| | | | | | | LSPGK (SEQ ID |
| | | | | | | NO: 282) |
| BJM11 | a_hCD3 | QVQLVQSGAEVKK | a_hCD | DIQMTQSP | a_hNKp3 | EIQLLESGGGLY |
| 53 | 3_huM1 | PGSSVKVSCKASG | 33_hu | SSLSASVG | 0_BJM04 | QPGGSLRLSCAV |
| | 95_VH- | YTFTDYNMHWVR | M195 | DRVTITCR | 11 scFv( | SGFSITTTGYHW |
| | hCHIgG | QAPGQGLEWIGYI | VL- | ASESVDN | VH/VL)- | NWVRQAPGKGL |
| | 1_knob_ | YPYNGGTGYNQKF | hCLIg | YGISFMN | hFc_Hole | EWVGYIYSSGST |
| | cys_N2 | KSKATITADESTNT | _vk | WFQQKPG | _cys_ | SYNPSLKSRETS |
| | 97A | AYMELSSLRSEDT | | KAPKLLIY | N29 | RDTSKNTFYLQ |
| | | AVYYCARGRPAM | | AASNQGS | 7A- | MNSLRAEDTAV |
| | | DYWGQGTLVTVSS | | GVPSRFSG | hIL2_F42 | YYCARGDWHYF |
| | | ASTKGPSVFPLAPS | | SGSGTDFT | A_Y45A | DYWGQGTMVT |
| | | SKSTSGGTAALGC | | LTISSLQP | | VSSGGGGSGGG |
| | | LVKDYFPEPVTVS | | DDFATYY | | GSGGGGSGGGG |
| | | WNSGALTSGVHTF | | CQQSKEV | | SDSVTTQSPLSLP |
| | | PAVLQSSGLYSLSS | | PWTFGQG | | VTLGQPASISCS |
| | | VVTVPSSSLGTQT | | TKVEIKRT | | GEKLSDKYVHW |
| | | YICNVNHKPSNTK | | VAAPSVFI | | YQQRPGQSPRM |
| | | VDKRVEPKSCDKT | | FPPSDEQL | | LIYENDRRESGY |
| | | HTCPPCPAPELIGG | | KSGTASV | | PDRESGSNSGND |
| | | PSVFLIPPKPKDTL | | VCLLNNF | | ATLKISRVEAED |
| | | MISRTPEVTCVVV | | YPREAKV | | VGVYFCQFWDS |
| | | DVSHEDPEVKFNW | | QWKVDN | | TNSAVFGGGTK |
| | | YVDGVEVHNAKT | | ALQSGNS | | VEIKQGGGSDKT |
| | | KPREEQYASTYRV | | QESVTEQ | | HTCPPCPAPELL |
| | | VSVLTVLHQDWLN | | DSKDSTY | | GGPSVFLFPPKP |
| | | GKEYKCKVSNKAL | | SLSSTLTL | | KDTLMISRTPEV |
| | | PAPIEKTISKAKGQ | | SKADYEK | | TCVVVDVSHED |
| | | PREPQVYTLPPCRE | | HKVYACE | | PEVKFNWYVDG |
| | | EMTKNQVSLWCL | | VTHQGLS | | VEVHNAKTKPR |
| | | VKGFYPSDIAVEW | | SPVTKSFN | | EEQYASTYRVVS |
| | | ESNGQPENNYKTT | | RGEC (SEQ | | VLTVLHQDWLN |
| | | PPVLDSDGSFFLYS | | ID NO: 280) | | GKEYKCKVSNK |
| | | KLTVDKSRWQQG | | | | ALPAPIEKTISKA |
| | | NVFSCSVMHEALH | | | | KGQPREPQVCTL |
| | | NHYTQKSLSLSPG | | | | PPSREEMTKNQV |
| | | K (SEQ ID NO: 279) | | | | SLSCAVKGFYPS |
| | | | | | | DIAVEWESNGQP |
| | | | | | | ENNYKTTPPVLD |
| | | | | | | SDGSFFLVSKLT |
| | | | | | | VDKSRWQQGNV |
| | | | | | | FSCSVMHEALH |
| | | | | | | NHYTQKSLSLSP |
| | | | | | | GKGGGGSGGGG |
| | | | | | | SGGGQSAPISSS |
| | | | | | | TKKTQLQLEHLL |
| | | | | | | LDIQMILNGINN |
| | | | | | | YKNPKLTRMLT |
| | | | | | | AKFAMPKKATE |
| | | | | | | LKHLQCLEEELK |
| | | | | | | PLEEVLNLAQSK |
| | | | | | | NFHLRPRDLISNI |
| | | | | | | NVIVLELKGSET |
| | | | | | | TFMCEYADETA |
| | | | | | | TIVEFLNRWITFC |
| | | | | | | QSIISTLT (SEQ |
| | | | | | | ID NO: 283) |

*The anti-NKp30 scFv sequences are underlined.

### Immune Cell Engagers

[0228] The immune cell engagers of the multispecific or multifunctional molecules disclosed herein can mediate binding to, and/or activation of, an immune cell, e.g., an immune effector cell. In some embodiments, the immune cell is chosen from a T cell, an NK cell, a B cell, a dendritic cell, or a macrophage cell engager, or a combination thereof. In some embodiments, the immune cell engager is chosen from one, two, three, or all of a T cell engager, NK cell engager, a B cell engager, a dendritic cell engager, or a macrophage cell engager, or a combination thereof. The immune cell engager can be an agonist of the immune system. In some embodiments, the immune cell engager can be an antibody molecule, a ligand molecule (e.g., a ligand that further comprises an immunoglobulin constant region, e.g., an Fc region), a small molecule, or a nucleotide molecule.

### T Cell Engagers

[0229] The present disclosure provides, inter alia, multispecific (e.g., bi-, tri-, quad-specific) or multifunctional molecules, that are engineered to contain one or more T cell engager that mediate binding to and/or activation of a T cell. Accordingly, in some embodiments, the T cell engager is selected from an antigen binding domain or ligand that binds to (e.g., and in some embodiments activates) one or more of the variable chain of the beta subunit of a TCR (e.g., TCRβV), CD3, TCRα, TCRβ, TCRγ, TCRζ, ICOS, CD28, CD27, HVEM, LIGHT, CD40, 4-1BB, OX40, DR3, GITR, CD30, TIM1, SLAM, CD2, or CD226. In other embodiments, the T cell engager is selected from an antigen binding domain or ligand that binds to and does not activate one or more of TCRβV, CD3, TCRα, TCRβ, TCRγ, TCRζ, ICOS, CD28, CD27, HVEM, LIGHT, CD40, 4-1BB, OX40, DR3, GITR, CD30, TIM1, SLAM, CD2, or CD226. In some embodiments, the T cell engager binds to TCRβV.

### Human T Cell Receptor (TCR) Complex

[0230] T cell receptors (TCR) can be found on the surface of T cells. TCRs recognize antigens, e.g., peptides, presented on, e.g., bound to, major histocompatibility complex (MHC) molecules on the surface of cells, e.g., antigen-presenting cells. TCRs are heterodimeric molecules and can comprise an alpha chain, a beta chain, a gamma chain or a delta chain. TCRs comprising an alpha chain and a beta chain are also referred to as TCRαβ. The TCR beta chain consists of the following regions (also known as segments): variable (V), diversity (D), joining (J) and constant (C) (see Mayer G. and Nyland J. (2010) Chapter 10: Major Histocompatibility Complex and T-cell Receptors-Role in Immune Responses. In: Microbiology and Immunology on-line, University of South Carolina School of Medicine). The TCR alpha chain consists of V, J and C regions. The rearrangement of the T-cell receptor (TCR) through somatic recombination of V (variable), D (diversity), J (joining), and C (constant) regions is a defining event in the development and maturation of a T cell. TCR gene rearrangement takes place in the thymus.

[0231] TCRs can comprise a receptor complex, known as the TCR complex, which comprises a TCR heterodimer comprising of an alpha chain and a beta chain, and dimeric signaling molecules, e.g., CD3 co-receptors, e.g., CD3δ/ε, and/or CD3γ/ε.

### TCR Beta V (TCRβV)

[0232] Diversity in the immune system enables protection against a huge array of pathogens. Since the germline genome is limited in size, diversity is achieved not only by the process of V(D)J recombination but also by junctional (junctions between V-D and D-J segments) deletion of nucleotides and addition of pseudo-random, non-templated nucleotides. The TCR beta gene undergoes gene arrangement to generate diversity.

[0233] The TCR V beta repertoire varies between individuals and populations because of, e.g., 7 frequently occurring inactivating polymorphisms in functional gene segments and a large insertion/deletion-related polymorphism encompassing 2 V beta gene segments.

[0234] This disclosure provides, inter alia, antibody molecules and fragments thereof, that bind, e.g., specifically bind, to a human TCR beta V chain (TCRβV), e.g., a TCRβV gene family (also referred to as a group), e.g., a TCRβV subfamily (also referred to as a subgroup), e.g., as described herein. TCR beta V families and subfamilies are known in the art, e.g., as described in Yassai et al., (2009) Immunogenetics 61(7)pp:493-502; Wei S. and Concannon P. (1994) Human Immunology 41(3) pp: 201-206. The antibodies described herein can be recombinant antibodies, e.g., recombinant non-murine antibodies, e.g., recombinant human or humanized antibodies.

[0235] In an aspect, the disclosure provides an anti-TCRβV antibody molecule that binds to human TCRβV, e.g., a TCRβV family, e.g., gene family or a variant thereof. In some embodiments a TCRBV gene family comprises one or more subfamilies, e.g., as described herein, e.g., in FIG. 3, Table 8A-1 or Table 8B-1. In some embodiments, the TCRβV gene family comprises: a TCRβ V6 subfamily, a TCRβ V10 subfamily, a TCRβ V12 subfamily, a TCRβ V5 subfamily, a TCRβ V7 subfamily, a TCRβ V11 subfamily, a TCRβ V14 subfamily, a TCRβ V16 subfamily, a TCRβ V18 subfamily, a TCRβ V9 subfamily, a TCRβ V13 subfamily, a TCRβ V4 subfamily, a TCRβ V3 subfamily, a TCRβ V2 subfamily, a TCRβ V15 subfamily, a TCRβ V30 subfamily, a TCRβ V19 subfamily, a TCRβ V27 subfamily, a TCRβ V28 subfamily, a TCRβ V24 subfamily, a TCRβ V20 subfamily, TCRβ V25 subfamily, a TCRβ V29 subfamily, a TCRβ V1 subfamily, a TCRβ V17 subfamily, a TCRβ V21 subfamily, a TCRβ V23 subfamily, or a TCRβ V26 subfamily.

[0236] In some embodiments, TCRβ V6 subfamily is also known as TCRβ V13.1. In some embodiments, the TCRβ V6 subfamily comprises: TCRβ V6-4*01, TCRβ V6-4*02, TCRβ V6-9*01, TCRβ V6-8*01, TCRβ V6-5*01, TCRβ V6-6*02, TCRβ V6-6*01, TCRβ V6-2*01, TCRβ V6-3*01 or TCRβ V6-1*01, or a variant thereof. In some embodiments, TCRβ V6 comprises TCRβ V6-4*01, or a variant thereof. In some embodiments, TCRβ V6 comprises TCRβ V6-4*02, or a variant thereof. In some embodiments, TCRβ V6 comprises TCRβ V6-9*01, or a variant thereof. In some embodiments, TCRβ V6 comprises TCRβ V6-8*01, or a variant thereof. In some embodiments, TCRβ V6 comprises TCRβ V6-5*01, or a variant thereof. In some embodiments, TCRβ V6 comprises TCRβ V6-6*02, or a variant thereof. In some embodiments, TCRβ V6 comprises TCRβ V6-6*01, or a variant thereof. In some embodiments, TCRβ V6 comprises TCRβ V6-2*01, or a variant thereof. In some embodiments, TCRβ V6 comprises TCRβ V6-3*01, or a variant thereof. In some embodiments, TCRβ V6 comprises TCRβ V6-1*01, or a variant thereof.

[0237] In some embodiments, TCRβ V6 comprises TCRβ V6-5*01, or a variant thereof. In some embodiments, TCRβ V6, e.g., TCRβ V6-5*01, is recognized, e.g., bound, by SEQ ID NO: 1 and/or SEQ ID NO: 2. In some embodiments, TCRβ V6, e.g., TCRβ V6-5*01, is recognized, e.g., bound, by SEQ ID NO: 9 and/or SEQ ID NO: 10. In some embodiments, TCRβ V6 is recognized, e.g., bound, by SEQ ID NO: 9 and/or SEQ ID NO: 11.

[0238] In some embodiments, TCRβ V10 subfamily is also known as TCRβ V12. In some embodiments, the TCRβ V10 subfamily comprises: TCRβ V10-1*01, TCRβ V10-1*02, TCRβ V10-3*01 or TCRβ V10-2*01, or a variant thereof.

[0239] In some embodiments, TCRβ V12 subfamily is also known as TCRβ V8.1. In some embodiments, the TCRβ V12 subfamily comprises: TCRβ V12-4*01, TCRβ V12-3*01, or TCRβ V12-5*01, or a variant thereof. In some embodiments, TCRβ V12 is recognized, e.g., bound, by SEQ ID NO: 15 and/or SEQ ID NO: 16. In some embodiments, TCRβ V12 is recognized, e.g., bound, by any one of SEQ ID NOs 308, 3438, or −309, and/or any one of SEQ ID NO: 238-242:

[0240] In some embodiments, the TCRβ V5 subfamily is chosen from: TCRβ V5-5*01, TCRβ V5-6*01, TCRβ V5-4*01, TCRβ V5-8*01, TCRβ V5-1*01, or a variant thereof.

[0241] In some embodiments, the TCRβ V7 subfamily comprises TCRβ V7-7*01, TCRβ V7-6*01, TCRβ V7-8*02, TCRβ V7-4*01, TCRβ V7-2*02, TCRβ V7-2*03, TCRβ V7-2*01, TCRβ V7-3*01, TCRβ V7-9*03, or TCRβ V7-9*01, or a variant thereof.

[0242] In some embodiments, the TCRβ V11 subfamily comprises: TCRβ V11-1*01, TCRβ V11-2*01 or TCRβ V11-3*01, or a variant thereof.

[0243] In some embodiments, the TCRβ V14 subfamily comprises TCRβ V14*01, or a variant thereof.

[0244] In some embodiments, the TCRβ V16 subfamily comprises TCRβ V16*01, or a variant thereof.

[0245] In some embodiments, the TCRβ V18 subfamily comprises TCRβ V18*01, or a variant thereof.

[0246] In some embodiments, the TCRβ V9 subfamily comprises TCRβ V9*01 or TCRβ V9*02, or a variant thereof.

[0247] In some embodiments, the TCRβ V13 subfamily comprises TCRβ V13*01, or a variant thereof.

[0248] In some embodiments, the TCRβ V4 subfamily comprises TCRβ V4-2*01, TCRβ V4-3*01, or TCRβ V4-1*01, or a variant thereof.

[0249] In some embodiments, the TCRβ V3 subfamily comprises TCRβ V3-1*01, or a variant thereof.

[0250] In some embodiments, the TCRβ V2 subfamily comprises TCRβ V2*01, or a variant thereof.

[0251] In some embodiments, the TCRβ V15 subfamily comprises TCRβ V15*01, or a variant thereof.

[0252] In some embodiments, the TCRβ V30 subfamily comprises TCRβ V30*01, or TCRβ V30*02, or a variant thereof.

[0253] In some embodiments, the TCRβ V19 subfamily comprises TCRβ V19*01, or TCRβ V19*02, or a variant thereof.

[0254] In some embodiments, the TCRβ V27 subfamily comprises TCRβ V27*01, or a variant thereof.

[0255] In some embodiments, the TCRβ V28 subfamily comprises TCRβ V28*01, or a variant thereof.

[0256] In some embodiments, the TCRβ V24 subfamily comprises TCRβ V24-1*01, or a variant thereof.

[0257] In some embodiments, the TCRβ V20 subfamily comprises TCRβ V20-1*01, or TCRβ V20-1*02, or a variant thereof.

[0258] In some embodiments, the TCRβ V25 subfamily comprises TCRβ V25-1*01, or a variant thereof.

[0259] In some embodiments, the TCRβ V29 subfamily comprises TCRβ V29-1*01, or a variant thereof.

TABLE 8A-1
List of TCRβV subfamilies and subfamily members

| Reference | | |
|---|---|---|
| in FIG. 3 | Subfamily | Subfamily members |
| A | TCRβ V6 | TCRβ V6-4*01, TCRβ V6-4*02, TCRβ V6-9*01, |
| | Also referred to as: | TCRβ V6-8*01, TCRβ V6-5*01, TCRβ V6-6*02, |
| | TCRβ VB 13.1 | TCRβ V6-6*01, TCRβ V6-2*01, |
| | | TCRβ V6-3*01 or TCRβ V6-1*01. |
| B | TCRβ V10 | TCRβ V10-1*01, TCRβ V10-1*02, |
| | Also referred to as: | TCRβ V10-3*01 or TCRβ V10-2*01 |
| | TCRβft VI2 | |
| C | TCRβ V12 | TCRβ V12-4*01, TCRβ V12-3*01, |
| | Also referred to as: | or TCRβ V12-5*01 |
| | TCRβ V8.1 | |
| D | TCRβ V5 | TCRβ V5-5*01, TCRβ V5-6*01, TCRβ V5-4*01, |
| | | TCRβ V5-8*01, TCRβ V5-1*01 |
| E | TCRβ V7 | TCRβ V7-7*01, TCRβ V7-6*01, TCRβ V7-8*02, |
| | | TCRβ V7-4*01, TCRβ V7-2*02, TCRβ V7-2*03, |
| | | TCRβ V7-2*01, TCRβ(3 V7-3*01, |
| | | TCRβ V7-9*03, or TCRβ V7-9*01 |
| F | TCRβ V11 | TCRβ V11-1*01, TCRβ V11-2*01 |
| | | or TCRβ V11-3*01 |
| G | TCRβ V14 | TCRβ V14* 01 |
| H | TCRβ VI6 | TCRβ V16*01 |
| I | TCRβ V18 | TCRβ V18*01 |
| J | TCRβ V9 | TCRβ V9*01 or TCRβ V9*02 |
| K | TCRβ VI3 | TCRβ V13*01 |
| L | TCRβ V4 | TCRβ V4-2*01, TCRβ V4-3*01, |
| | | or TCRβ V4-1*01 |
| M | TCRβ V3 | TCRβ V3-1*01 |
| N | TCRβ V2 | TCRβ V2* 01 |
| O | TCRβ V15 | TCRβ V15*01 |
| P | TCRβ V30 | TCRβ V30*01, or TCRβ V30*02 |
| Q | TCRβ V19 | TCRβ V19*01, or TCRβ V19*02 |
| R | TCRβ V27 | TCRβ V27*01. |
| S | TCRβ V28 | TCRβ V28*01. |
| T | TCRβ V24 | TCRβ V24-1*01 |
| U | TCRβ V20 | TCRβ V20-1*01, or TCRβ V20-1*02 |
| V | TCRβ V25 | TCRβ V25-1*01 |
| W | TCRβ V29 | TCRβ V29-1*01 |

TABLE 8B-1
Additional TCRβV subfamilies
Subfamily

TCRβ V1
TCRβ V17
TCRβ V21
TCRβ V23
TCRβ V26

### Anti-TCRβV Antibodies

[0260] Disclosed herein, is the discovery of a novel class of antibodies, i.e. anti-TCRβV antibody molecules disclosed herein, which despite having low sequence similarity (e.g., low sequence identity among the different antibody molecules that recognize different TCRβV subfamilies), recognize a structurally conserved region, e.g., domain, on the TCRβV protein and have a similar function (e.g., a similar cytokine profile). Thus, the anti-TCRβV antibody molecules disclosed herein share a structure-function relationship.

[0261] In some embodiments, the anti-TCRβV antibody molecules disclosed herein do not recognize, e.g., bind to, an interface of a TCRβV:TCRalpha complex.

[0262] In some embodiments, the anti-TCRβV antibody molecules disclosed herein do not recognize, e.g., bind to, a constant region of a TCRβV protein. An exemplary antibody that binds to a constant region of a TCRBV region is JOVI.1 as described in Viney et al., (Hybridoma. 1992 December; 11(6):701-13).

[0263] In some embodiments, the anti-TCRβV antibody molecules disclosed herein do not recognize, e.g., bind to, one or more (e.g., all) of a complementarity determining region (e.g., CDR1, CDR2 and/or CDR3) of a TCRβV protein.

[0264] In some embodiments, the anti-TCRβV antibody molecules disclosed herein binds (e.g., specifically binds) to a TCRβV region. In some embodiments, binding of anti-TCRβV antibody molecules disclosed herein results in a cytokine profile that differs from a cytokine profile of a T cell engager that binds to a receptor or molecule other than a TCRβV region (“a non-TCRβV-binding T cell engager”). In some embodiments, the non-TCRβV-binding T cell engager comprises an antibody that binds to a CD3 molecule (e.g., CD3 epsilon (CD3e) molecule); or a TCR alpha (TCRα) molecule. In some embodiments, the non-TCRβV-binding T cell engager is an OKT3 antibody or an SP34-2 antibody.

[0265] In an aspect, the disclosure provides an anti-TCRβV antibody molecule that binds to human TCRβV, e.g., a TCRβV gene family, e.g., one or more of a TCRβV subfamily, e.g., as described herein, e.g., in FIG. 3, Table 8A-1, or Table 8B-1. In some embodiments, the anti-TCRβV antibody molecule binds to one or more TCRβV subfamilies chosen from: a TCRβ V6 subfamily, a TCRβ V10 subfamily, a TCRβ V12 subfamily, a TCRβ V5 subfamily, a TCRβ V7 subfamily, a TCRβ V11 subfamily, a TCRβ V14 subfamily, a TCRβ V16 subfamily, a TCRβ V18 subfamily, a TCRβ V9 subfamily, a TCRβ V13 subfamily, a TCRβ V4 subfamily, a TCRβ V3 subfamily, a TCRβ V2 subfamily, a TCRβ V15 subfamily, a TCRβ V30 subfamily, a TCRβ V19 subfamily, a TCRβ V27 subfamily, a TCRβ V28 subfamily, a TCRβ V24 subfamily, a TCRβ V20 subfamily, TCRβ V25 subfamily, a TCRβ V29 subfamily, a TCRβ V1 subfamily, a TCRβ V17 subfamily, a TCRβ V21 subfamily, a TCRβ V23 subfamily, or a TCRβ V26 subfamily, or a variant thereof.

[0266] In some embodiments, the anti-TCRβV antibody molecule binds to a TCRβ V6 subfamily comprising: TCRβ V6-4*01, TCRβ V6-4*02, TCRβ V6-9*01, TCRβ V6-8*01, TCRβ V6-5*01, TCRβ V6-6*02, TCRβ V6-6*01, TCRβ V6-2*01, TCRβ V6-3*01 or TCRβ V6-1*01, or a variant thereof. In some embodiments the TCRβ V6 subfamily comprises TCRβ V6-5*01, or a variant thereof. In some embodiments, TCRβ V6 comprises TCRβ V6-4*01, or a variant thereof. In some embodiments, TCRβ V6 comprises TCRβ V6-4*02, or a variant thereof. In some embodiments, TCRβ V6 comprises TCRβ V6-9*01, or a variant thereof. In some embodiments, TCRβ V6 comprises TCRβ V6-8*01, or a variant thereof. In some embodiments, TCRβ V6 comprises TCRβ V6-5*01, or a variant thereof. In some embodiments, TCRβ V6 comprises TCRβ V6-6*02, or a variant thereof. In some embodiments, TCRβ V6 comprises TCRβ V6-6*01, or a variant thereof. In some embodiments, TCRβ V6 comprises TCRβ V6-2*01, or a variant thereof. In some embodiments, TCRβ V6 comprises TCRβ V6-3*01, or a variant thereof. In some embodiments, TCRβ V6 comprises TCRβ V6-1*01, or a variant thereof.

[0267] In some embodiments, the anti-TCRβV antibody molecule binds to a TCRβ V10 subfamily comprising: TCRβ V10-1*01, TCRβ V10-1*02, TCRβ V10-3*01 or TCRβ V10-2*01, or a variant thereof.

[0268] In some embodiments, the anti-TCRβV antibody molecule binds to a TCRβ V12 subfamily comprising: TCRβ V12-4*01, TCRβ V12-3*01 or TCRβ V12-5*01, or a variant thereof.

[0269] In some embodiments, the anti-TCRβV antibody molecule binds to a TCRβ V5 subfamily comprising: TCRβ V5-5*01, TCRβ V5-6*01, TCRβ V5-4*01, TCRβ V5-8*01, TCRβ V5-1*01, or a variant thereof.

[0270] In some embodiments, the anti-TCRβV antibody molecule does not bind to TCRβ V12, or binds to TCRβ V12 with an affinity and/or binding specificity that is less than (e.g., less than about 10%, 20%, 30%, 40%, 50%, 60%, 70%, 80%, 90% or about 2-, 5-, or 10-fold) the affinity and/or binding specificity of the 16G8 murine antibody or a humanized version thereof as described in U.S. Pat. No. 5,861,155.

[0271] In some embodiments, the anti-TCRβV antibody molecule binds to TCRβ V12 with an affinity and/or binding specificity that is greater than (e.g., greater than about 10%, 20%, 30%, 40%, 50%, 60%, 70%, 80%, 90% or about 2-, 5-, or 10-fold) the affinity and/or binding specificity of the 16G8 murine antibody or a humanized version thereof as described in U.S. Pat. No. 5,861,155.

[0272] In some embodiments, the anti-TCRβV antibody molecule binds to a TCRβV region other than TCRβ V12 (e.g., TCRβV region as described herein, e.g., TCRβ V6 subfamily (e.g., TCRβ V6-5*01) with an affinity and/or binding specificity that is greater than (e.g., greater than about 10%, 20%, 30%, 40%, 50%, 60%, 70%, 80%, 90% or about 2-, 5-, or 10-fold) the affinity and/or binding specificity of the 16G8 murine antibody or a humanized version thereof as described in U.S. Pat. No. 5,861,155.

[0273] In some embodiments, the anti-TCRβV antibody molecule does not bind to TCRβ V5-5*01 or TCRβ V5-1*01, or binds to TCRβ V5-5*01 or TCRβ V5-1*01 with an affinity and/or binding specificity that is less than (e.g., less than about 10%, 20%, 30%, 40%, 50%, 60%, 70%, 80%, 90% or about 2-, 5-, or 10-fold) the affinity and/or binding specificity of the TM23 murine antibody or a humanized version thereof as described in U.S. Pat. No. 5,861,155.

[0274] In some embodiments, the anti-TCRβV antibody molecule binds to TCRβ V5-5*01 or TCRβ V5-1*01 with an affinity and/or binding specificity that is greater than (e.g., greater than about 10%, 20%, 30%, 40%, 50%, 60%, 70%, 80%, 90% or about 2-, 5-, or 10-fold) the affinity and/or binding specificity of the TM23 murine antibody or a humanized version thereof as described in U.S. Pat. No. 5,861,155.

[0275] In some embodiments, the anti-TCRβV antibody molecule binds to a TCRβV region other than TCRβ V5-5*01 or TCRβ V5-1*01 (e.g., TCRβV region as described herein, e.g., TCRβ V6 subfamily (e.g., TCRβ V6-5*01) with an affinity and/or binding specificity that is greater than (e.g., greater than about 10%, 20%, 30%, 40%, 50%, 60%, 70%, 80%, 90% or about 2-, 5-, or 10-fold) the affinity and/or binding specificity of the TM23 murine antibody or a humanized version thereof as described in U.S. Pat. No. 5,861,155.

### Anti-TCRβ V6 Antibodies

[0276] Accordingly, in one aspect, the disclosure provides an anti-TCRβV antibody molecule that binds to human TCRβ V6, e.g., a TCRβ V6 subfamily comprising: TCRβ V6-4*01, TCRβ V6-4*02, TCRβ V6-9*01, TCRβ V6-8*01, TCRβ V6-5*01, TCRβ V6-6*02, TCRβ V6-6*01, TCRβ V6-2*01, TCRβ V6-3*01 or TCRβ V6-1*01. In some embodiments the TCRβ V6 subfamily comprises TCRβ V6-5*01 or a variant thereof. In some embodiments, TCRβ V6 comprises TCRβ V6-4*01, or a variant thereof. In some embodiments, TCRβ V6 comprises TCRβ V6-4*02, or a variant thereof. In some embodiments, TCRβ V6 comprises TCRβ V6-9*01, or a variant thereof. In some embodiments, TCRβ V6 comprises TCRβ V6-8*01, or a variant thereof. In some embodiments, TCRβ V6 comprises TCRβ V6-5*01, or a variant thereof. In some embodiments, TCRβ V6 comprises TCRβ V6-6*02, or a variant thereof. In some embodiments, TCRβ V6 comprises TCRβ V6-6*01, or a variant thereof. In some embodiments, TCRβ V6 comprises TCRβ V6-2*01, or a variant thereof. In some embodiments, TCRβ V6 comprises TCRβ V6-3*01, or a variant thereof. In some embodiments, TCRβ V6 comprises TCRβ V6-1*01, or a variant thereof.

[0277] In some embodiments, TCRβ V6-5*01 is encoded by the nucleic acid sequence of SEQ ID NO: 253, or a sequence having 85%, 90%, 95%, 99% or more identity thereof.

SEQ ID NO: 253:
ATGAGCATCGGCCTCCTGTGCTGTGCAGCCTTGTCTCTC
CTGTGGGCAGGTCCAGTGAATGCTGGTGTCACTCAGACC
CCAAAATTCCAGGTCCTGAAGACAGGACAGAGCATGACA
CTGCAGTGTGCCCAGGATATGAACCATGAATACATGTCC
TGGTATCGACAAGACCCAGGCATGGGGCTGAGGCTGATT
CATTACTCAGTTGGTGCTGGTATCACTGACCAAGGAGAA
GTCCCCAATGGCTACAATGTCTCCAGATCAACCACAGAG
GATTTCCCGCTCAGGCTGCTGTCGGCTGCTCCCTCCCAG
ACATCTGTGTACTTCTGTGCCAGCAGTTACTC

[0278] In some embodiments, TCRβ V6-5*01 comprises the amino acid sequence of SEQ ID NO: 254, or an amino acid sequence having 85%, 90%, 95%, 99% or more identity thereof.

SEQ ID NO: 254:
MSIGLLCCAALSLLWAGPVNAGVTQTPKFQVLKTGQSMT
LQCAQDMNHEYMSWYRQDPGMGLRLIHYSVGAGITDQGE
VPNGYNVSRSTTEDFPLRLLSAAPSQTSVYFCASSY

[0279] In some embodiments, the anti-TCRβV antibody molecule, e.g., anti-TCRβ V6 (e.g., anti-TCR P V6-5*01) antibody molecule, is a non-murine antibody molecule, e.g., a human or humanized antibody molecule. In some embodiments, the anti-TCRβV antibody molecule, e.g., anti-TCRβ V6 (e.g., anti-TCRβ V6-5*01) antibody molecule is a human antibody molecule. In some embodiments, the anti-TCRβV antibody molecule, e.g., anti-TCRβ V6 (e.g., anti-TCRβ V6-5*01) antibody molecule is a humanized antibody molecule.

[0280] In some embodiments, the anti-TCRβV antibody molecule, e.g., anti-TCRβ V6 (e.g., anti-TCRβ V6-5*01) antibody molecule, is isolated or recombinant.

[0281] In some embodiments, the anti-TCRβV antibody molecule, e.g., anti-TCRβ V6 (e.g., anti-TCRβ V6-5*01) antibody molecule, comprises at least one antigen-binding region, e.g., a variable region or an antigen-binding fragment thereof, from an antibody described herein, e.g., an antibody chosen from any one of A-H.1 to A-H.85, e.g., A-H.1, A-H.2 or A-H.68, or an antibody described in TABLE 1A, or encoded by a nucleotide sequence in TABLE 1A, or a sequence substantially identical (e.g., at least 80%, 85%, 90%, 92%, 95%, 97%, 98%, 99% or higher identical) to any of the aforesaid sequences.

[0282] In some embodiments, the anti-TCRβV antibody molecule, e.g., anti-TCRβ V6 (e.g., anti-TCRβ V6-5*01) antibody molecule, comprises at least one, two, three or four variable regions from an antibody described herein, e.g., an antibody chosen from any one of A-H.1 to A-H.85, e.g., A-H.1, A-H.2 or A-H.68, or an antibody described in TABLE 1A, or encoded by a nucleotide sequence in TABLE 1A, or a sequence substantially identical (e.g., at least 80%, 85%, 90%, 92%, 95%, 97%, 98%, 99% or higher identical) to any of the aforesaid sequences.

[0283] In some embodiments, the anti-TCRβV antibody molecule, e.g., anti-TCRβ V6 (e.g., anti-TCRβ V6-5*01) antibody molecule, comprises at least one or two heavy chain variable regions from an antibody described herein, e.g., an antibody chosen from any one of A-H.1 to A-H.85, e.g., A-H.1, A-H.2 or A-H.68, or an antibody molecule described in TABLE 1A, or encoded by a nucleotide sequence in TABLE 1A, or a sequence substantially identical (e.g., at least 80%, 85%, 90%, 92%, 95%, 97%, 98%, 99% or higher identical) to any of the aforesaid sequences.

[0284] In some embodiments, the anti-TCRβV antibody molecule comprises a heavy chain variable region (VH) having a consensus sequence of SEQ ID NO: 260 or 3290.

[0285] In some embodiments, the anti-TCRβV antibody molecule, e.g., anti-TCRβ V6 (e.g., anti-TCRβ V6-5*01) antibody molecule, comprises at least one or two light chain variable regions from an antibody described herein, e.g., an antibody chosen from any one of A-H.1 to A-H.85, e.g., A-H.1, A-H.2 or A-H.68, or an antibody described in TABLE 1A, or encoded by a nucleotide sequence in TABLE 1A, or a sequence substantially identical (e.g., at least 80%, 85%, 90%, 92%, 95%, 97%, 98%, 99% or higher identical) to any of the aforesaid sequences.

[0286] In some embodiments, the anti-TCRβV antibody molecule comprises a light chain variable region (VL) having a consensus sequence of SEQ ID NO: 259 or 3289.

[0287] In some embodiments, the anti-TCRβV antibody molecule, e.g., anti-TCRβ V6 (e.g., anti-TCRβ V6-5*01) antibody molecule, comprises a heavy chain constant region for an IgG4, e.g., a human IgG4. In still another embodiment, the anti-TCRβV antibody molecule, e.g., anti-TCRβ V6 (e.g., anti-TCRβ V6-5*01) antibody molecule includes a heavy chain constant region for an IgG1, e.g., a human IgG1. In one embodiment, the heavy chain constant region comprises an amino sequence set forth in Table 3A, or a sequence substantially identical (e.g., at least 80%, 85%, 90%, 92%, 95%, 97%, 98%, 99% or higher identical) thereto.

[0288] In some embodiments, the anti-TCRβV antibody molecule, e.g., anti-TCRβ V6 (e.g., anti-TCRβ V6-5*01) antibody molecule, includes a kappa light chain constant region, e.g., a human kappa light chain constant region. In one embodiment, the light chain constant region comprises an amino sequence set forth in Table 3A, or a sequence substantially identical (e.g., at least 80%, 85%, 90%, 92%, 95%, 97%, 98%, 99% or higher identical) thereto.

[0289] In some embodiments, the anti-TCRβV antibody molecule, e.g., anti-TCRβ V6 (e.g., anti-TCRβ V6-5*01) antibody molecule, includes at least one, two, or three complementarity determining regions (CDRs) from a heavy chain variable region (VH) of an antibody described herein, e.g., an antibody chosen from any one of A-H.1 to A-H.85, e.g., A-H.1, A-H.2 or A-H.68, or an antibody described in TABLE 1A, or encoded by a nucleotide sequence in TABLE 1A, or a sequence substantially identical (e.g., at least 80%, 85%, 90%, 92%, 95%, 97%, 98%, 99% or higher identical) to any of the aforesaid sequences.

[0290] In some embodiments, the anti-TCRβV antibody molecule, e.g., anti-TCRβ V6 (e.g., anti-TCRβ V6-5*01) antibody molecule, includes at least one, two, or three CDRs (or collectively all of the CDRs) from a heavy chain variable region comprising an amino acid sequence shown in TABLE 1A, or encoded by a nucleotide sequence shown in TABLE 1A. In one embodiment, one or more of the CDRs (or collectively all of the CDRs) have one, two, three, four, five, six or more changes, e.g., amino acid substitutions or deletions, relative to the amino acid sequence shown in TABLE 1A, or encoded by a nucleotide sequence shown in TABLE 1A.

[0291] In some embodiments, the anti-TCRβV antibody molecule, e.g., anti-TCRβ V6 (e.g., anti-TCRβ V6-5*01) antibody molecule, includes at least one, two, or three complementarity determining regions (CDRs) from a light chain variable region of an antibody described herein, e.g., an antibody chosen from any one of A-H.1 to A-H.85, e.g., A-H.1, A-H.2 or A-H.68, or an antibody described in TABLE 1A, or encoded by a nucleotide sequence in TABLE 1A, or a sequence substantially identical (e.g., at least 80%, 85%, 90%, 92%, 95%, 97%, 98%, 99% or higher identical) to any of the aforesaid sequences.

[0292] In some embodiments, the anti-TCRβV antibody molecule, e.g., anti-TCRβ V6 (e.g., anti-TCRβ V6-5*01) antibody molecule, includes at least one, two, or three CDRs (or collectively all of the CDRs) from a light chain variable region comprising an amino acid sequence shown in TABLE 1A, or encoded by a nucleotide sequence shown in TABLE 1A. In one embodiment, one or more of the CDRs (or collectively all of the CDRs) have one, two, three, four, five, six or more changes, e.g., amino acid substitutions or deletions, relative to the amino acid sequence shown in TABLE 1A, or encoded by a nucleotide sequence shown in TABLE 1A.

[0293] In some embodiments, the anti-TCRβV antibody molecule, e.g., anti-TCRβ V6 (e.g., anti-TCRβ V6-5*01) antibody molecule, includes at least one, two, three, four, five or six CDRs (or collectively all of the CDRs) from a heavy and light chain variable region comprising an amino acid sequence shown in TABLE 1A, or encoded by a nucleotide sequence shown in TABLE 1A. In one embodiment, one or more of the CDRs (or collectively all of the CDRs) have one, two, three, four, five, six or more changes, e.g., amino acid substitutions or deletions, relative to the amino acid sequence shown in TABLE 1A, or encoded by a nucleotide sequence shown in TABLE 1A.

[0294] In some embodiments, the anti-TCRβV antibody molecule, e.g., anti-TCRβ V6 (e.g., anti-TCRβ V6-5*01) antibody molecule, molecule includes all six CDRs from an antibody described herein, e.g., an antibody chosen from any one of A-H.1 to A-H.85, e.g., A-H.1, A-H.2 or A-H.68, or an antibody described in TABLE 1A, or encoded by a nucleotide sequence in TABLE 1A, or closely related CDRs, e.g., CDRs which are identical or which have at least one amino acid alteration, but not more than two, three or four alterations (e.g., substitutions, deletions, or insertions, e.g., conservative substitutions). In some embodiments, the anti-TCRβV antibody molecule, e.g., anti-TCRβ V6 (e.g., anti-TCRβ V6-5*01) antibody molecule, may include any CDR described herein.

[0295] In some embodiments, the anti-TCRβV antibody molecule, e.g., anti-TCRβ V6 (e.g., anti-TCRβ V6-5*01) antibody molecule includes at least one, two, or three CDRs according to Kabat et al. (e.g., at least one, two, or three CDRs according to the Kabat definition as set out in TABLE 1A) from a heavy chain variable region of an antibody described herein, e.g., an antibody chosen from any one of A-H.1 to A-H.85, e.g., A-H.1, A-H.2 or A-H.68, or an antibody described in TABLE 1A, or a sequence substantially identical (e.g., at least 80%, 85%, 90%, 92%, 95%, 97%, 98%, 99% or higher identical) to any of the aforesaid sequences; or which have at least one amino acid alteration, but not more than two, three or four alterations (e.g., substitutions, deletions, or insertions, e.g., conservative substitutions) relative to one, two, or three CDRs according to Kabat et al. shown in TABLE 1A.

[0296] In some embodiments, the anti-TCRβV antibody molecule, e.g., anti-TCRβ V6 (e.g., anti-TCRβ V6-5*01) antibody molecule includes at least one, two, or three CDRs according to Kabat et al. (e.g., at least one, two, or three CDRs according to the Kabat definition as set out in TABLE 1A) from a light chain variable region of an antibody described herein, e.g., an antibody chosen from any one of A-H.1 to A-H.85, e.g., A-H.1, A-H.2 or A-H.68, or an antibody described in TABLE 1A, or a sequence substantially identical (e.g., at least 80%, 85%, 90%, 92%, 95%, 97%, 98%, 99% or higher identical) to any of the aforesaid sequences; or which have at least one amino acid alteration, but not more than two, three or four alterations (e.g., substitutions, deletions, or insertions, e.g., conservative substitutions) relative to one, two, or three CDRs according to Kabat et al. shown in TABLE 1A.

[0297] In some embodiments, the anti-TCRβV antibody molecule, e.g., anti-TCRβ V6 (e.g., anti-TCRβ V6-5*01) antibody molecule, includes at least one, two, three, four, five, or six CDRs according to Kabat et al. (e.g., at least one, two, three, four, five, or six CDRs according to the Kabat definition as set out in TABLE 1A) from the heavy and light chain variable regions of an antibody described herein, e.g., an antibody chosen from any one of A-H.1 to A-H.85, e.g., A-H.1, A-H.2 or A-H.68, or an antibody described in TABLE 1A, or encoded by a nucleotide sequence in TABLE 1A; or a sequence substantially identical (e.g., at least 80%, 85%, 90%, 92%, 95%, 97%, 98%, 99% or higher identical) to any of the aforesaid sequences; or which have at least one amino acid alteration, but not more than two, three or four alterations (e.g., substitutions, deletions, or insertions, e.g., conservative substitutions) relative to one, two, three, four, five, or six CDRs according to Kabat et al. shown in TABLE 1A.

[0298] In some embodiments, the anti-TCRβV antibody molecule, e.g., anti-TCRβ V6 (e.g., anti-TCRβ V6-5*01) antibody molecule, includes all six CDRs according to Kabat et al. (e.g., all six CDRs according to the Kabat definition as set out in TABLE 1A) from the heavy and light chain variable regions of an antibody described herein, e.g., an antibody chosen from any one of A-H.1 to A-H.85, e.g., A-H.1, A-H.2 or A-H.68, or an antibody described in TABLE 1A, or encoded by a nucleotide sequence in TABLE 1A; or a sequence substantially identical (e.g., at least 80%, 85%, 90%, 92%, 95%, 97%, 98%, 99% or higher identical) to any of the aforesaid sequences; or which have at least one amino acid alteration, but not more than two, three or four alterations (e.g., substitutions, deletions, or insertions, e.g., conservative substitutions) relative to all six CDRs according to Kabat et al. shown in TABLE 1A. In one embodiment, the anti-TCRβV antibody molecule, e.g., anti-TCRβ V6 (e.g., anti-TCRβ V6-5*01) antibody molecule, may include any CDR described herein.

[0299] In some embodiments, the anti-TCRβV antibody molecule, e.g., anti-TCRβ V6 (e.g., anti-TCRβ V6-5*01) antibody molecule, includes at least one, two, or three hypervariable loops that have the same canonical structures as the corresponding hypervariable loop of an antibody described herein, e.g., an antibody chosen from chosen from any one of A-H.1 to A-H.85, e.g., A-H.1, A-H.2 or A-H.68, e.g., the same canonical structures as at least loop 1 and/or loop 2 of the heavy and/or light chain variable domains of an antibody described herein. See, e.g., Chothia et al., (1992) J. Mol. Biol. 227:799-817; Tomlinson et al., (1992) J. Mol. Biol. 227:776-798 for descriptions of hypervariable loop canonical structures. These structures can be determined by inspection of the tables described in these references.

[0300] In some embodiments, the anti-TCRβV antibody molecule, e.g., anti-TCRβ V6 (e.g., anti-TCRβ V6-5*01) antibody molecule includes at least one, two, or three CDRs according to Chothia et al. (e.g., at least one, two, or three CDRs according to the Chothia definition as set out in TABLE 1A) from a heavy chain variable region of an antibody described herein, e.g., an antibody chosen from any one of A-H.1 to A-H.85, e.g., A-H.1, A-H.2 or A-H.68, or as described in TABLE 1A, or a sequence substantially identical (e.g., at least 80%, 85%, 90%, 92%, 95%, 97%, 98%, 99% or higher identical) to any of the aforesaid sequences; or which have at least one amino acid alteration, but not more than two, three or four alterations (e.g., substitutions, deletions, or insertions, e.g., conservative substitutions) relative to one, two, or three CDRs according to Chothia et al. shown in TABLE 1A.

[0301] In some embodiments, the anti-TCRβV antibody molecule, e.g., anti-TCRβ V6 (e.g., anti-TCRβ V6-5*01) antibody molecule includes at least one, two, or three CDRs according to Chothia et al. (e.g., at least one, two, or three CDRs according to the Chothia definition as set out in TABLE 1A) from a light chain variable region of an antibody described herein, e.g., an antibody chosen from any one of A-H.1 to A-H.85, e.g., A-H.1, A-H.2 or A-H.68, or an antibody described in TABLE 1A, or a sequence substantially identical (e.g., at least 80%, 85%, 90%, 92%, 95%, 97%, 98%, 99% or higher identical) to any of the aforesaid sequences; or which have at least one amino acid alteration, but not more than two, three or four alterations (e.g., substitutions, deletions, or insertions, e.g., conservative substitutions) relative to one, two, or three CDRs according to Chothia et al. shown in TABLE 1A.

[0302] In some embodiments, the anti-TCRβV antibody molecule, e.g., anti-TCRβ V6 (e.g., anti-TCRβ V6-5*01) antibody molecule, includes at least one, two, three, four, five, or six CDRs according to Chothia et al. (e.g., at least one, two, three, four, five, or six CDRs according to the Chothia definition as set out in TABLE 1A) from the heavy and light chain variable regions of an antibody described herein, e.g., an antibody chosen from any one of A-H.1 to A-H.85, e.g., A-H.1, A-H.2 or A-H.68, or an antibody described in TABLE 1A, or encoded by the nucleotide sequence in TABLE 1A; or a sequence substantially identical (e.g., at least 80%, 85%, 90%, 92%, 95%, 97%, 98%, 99% or higher identical) to any of the aforesaid sequences; or which have at least one amino acid alteration, but not more than two, three or four alterations (e.g., substitutions, deletions, or insertions, e.g., conservative substitutions) relative to one, two, three, four, five, or six CDRs according to Chothia et al. shown in TABLE 1A.

[0303] In some embodiments, the anti-TCRβV antibody molecule, e.g., anti-TCRβ V6 (e.g., anti-TCRβ V6-5*01) antibody molecule, includes all six CDRs according to Chothia et al. (e.g., all six CDRs according to the Chothia definition as set out in TABLE 1A) from the heavy and light chain variable regions of an antibody described herein, e.g., an antibody chosen from any one of A-H.1 to A-H.85, e.g., A-H.1, A-H.2 or A-H.68, or an antibody described in TABLE 1A, or encoded by a nucleotide sequence in TABLE 1A; or a sequence substantially identical (e.g., at least 80%, 85%, 90%, 92%, 95%, 97%, 98%, 99% or higher identical) to any of the aforesaid sequences; or which have at least one amino acid alteration, but not more than two, three or four alterations (e.g., substitutions, deletions, or insertions, e.g., conservative substitutions) relative to all six CDRs according to Chothia et al. shown in TABLE 1A. In one embodiment, the anti-TCRβV antibody molecule, e.g., anti-TCRβ V6 (e.g., anti-TCRβ V6-5*01) antibody molecule, may include any CDR described herein.

[0304] In some embodiments, the anti-TCRβV antibody molecule, e.g., anti-TCRβ V6 (e.g., anti-TCRβ V6-5*01) antibody molecule, molecule includes a combination of CDRs or hypervariable loops defined according to Kabat et al., Chothia et al., or as described in TABLE 1A.

[0305] In some embodiments, the anti-TCRβV antibody molecule, e.g., anti-TCRβ V6 (e.g., anti-TCRβ V6-5*01) antibody molecule, can contain any combination of CDRs or hypervariable loops according to the Kabat and Chothia definitions.

[0306] In some embodiments, a combined CDR as set out in TABLE 1A is a CDR that comprises a Kabat CDR and a Chothia CDR.

[0307] In some embodiments, the anti-TCRβV antibody molecule, e.g., anti-TCRβ V6 (e.g., anti-TCRβ V6-5*01) antibody molecule, molecule includes a combination of CDRs or hypervariable loops identified as combined CDRs in TABLE 1A. In some embodiments, the anti-TCRβV antibody molecule, e.g., anti-TCRβ V6 (e.g., anti-TCRβ V6-5*01) antibody molecule, can contain any combination of CDRs or hypervariable loops according the “combined” CDRs are described in TABLE 1A.

[0308] In an embodiment, e.g., an embodiment comprising a variable region, a CDR (e.g., a combined CDR, Chothia CDR or Kabat CDR), or other sequence referred to herein, e.g., in TABLE 1A, the antibody molecule is a monospecific antibody molecule, a bispecific antibody molecule, a bivalent antibody molecule, a biparatopic antibody molecule, or an antibody molecule that comprises an antigen binding fragment of an antibody, e.g., a half antibody or antigen binding fragment of a half antibody. In certain embodiments the antibody molecule comprises a multispecific molecule, e.g., a bispecific molecule, e.g., as described herein.

[0309] In an embodiment, the anti-TCRβV antibody molecule, e.g., anti-TCRβ V6 (e.g., anti-TCRβ V6-5*01) antibody molecule includes:

(i) one, two or all of a light chain complementarity determining region 1 (LC CDR1), a light chain complementarity determining region 2 (LC CDR2), and a light chain complementarity determining region 3 (LC CDR3) of SEQ ID NO: 2, SEQ ID NO: 10 or SEQ ID NO: 11, and/or
(ii) one, two or all of a heavy chain complementarity determining region 1 (HC CDR1), heavy chain complementarity determining region 2 (HC CDR2), and a heavy chain complementarity determining region 3 (HC CDR3) of SEQ ID NO: 1 or SEQ ID NO: 9.

[0310] In some embodiments, the anti-TCRβV antibody molecule, e.g., anti-TCRβ V6 (e.g., anti-TCRβ V6-5*01) antibody molecule comprises a LC CDR1, LC CDR2, and LC CDR3 of SEQ ID NO: 2, and a HC CDR1, HC CDR2, and HC CDR3 of SEQ ID NO: 1.

[0311] In some embodiments the anti-TCRβV antibody molecule, e.g., anti-TCRβ V6 (e.g., anti-TCRβ V6-5*01) antibody molecule comprises a LC CDR1, LC CDR2, and LC CDR3 of SEQ ID NO: 10, and a HC CDR1, HC CDR2, and HC CDR3 of SEQ ID NO: 9.

[0312] In some embodiments, the anti-TCRβV antibody molecule, e.g., anti-TCRβ V6 (e.g., anti-TCRβ V6-5*01) antibody molecule comprises a LC CDR1, LC CDR2, and LC CDR3 of SEQ ID NO: 11, and a HC CDR1, HC CDR2, and HC CDR3 of SEQ ID NO: 9.

[0313] In an embodiment, the anti-TCRβV antibody molecule, e.g., anti-TCRβ V6 (e.g., anti-TCRβ V6-5*01) antibody molecule comprises:

(i) a LC CDR1 amino acid sequence of SEQ ID NO: 6, a LC CDR2 amino acid sequence of SEQ ID NO: 7, or a LC CDR3 amino acid sequence of SEQ ID NO: 8; and/or
(ii) a HC CDR1 amino acid sequence of SEQ ID NO: 3, a HC CDR2 amino acid sequence of SEQ ID NO: 4, or a HC CDR3 amino acid sequence of SEQ ID NO: 5.

[0314] In some embodiments, the anti-TCRβV antibody molecule, e.g., anti-TCRβ V6 (e.g., anti-TCRβ V6-5*01) antibody molecule comprises:

(i) a light chain variable region (VL) comprising a LC CDR1 amino acid sequence of SEQ ID NO: 6, a LC CDR2 amino acid sequence of SEQ ID NO: 7, or a LC CDR3 amino acid sequence of SEQ ID NO: 8; and/or
(ii) a heavy chain variable region (VH) comprising a HC CDR1 amino acid sequence of SEQ ID NO: 3, a HC CDR2 amino acid sequence of SEQ ID NO: 4, or a HC CDR3 amino acid sequence of SEQ ID NO: 5.

[0315] In an embodiment, the anti-TCRβV antibody molecule, e.g., anti-TCRβ V6 (e.g., anti-TCRβ V6-5*01) antibody molecule comprises:

(i) a LC CDR1 amino acid sequence of SEQ ID NO: 51, a LC CDR2 amino acid sequence of SEQ ID NO: 52, or a LC CDR3 amino acid sequence of SEQ ID NO: 53; and/or
(ii) a HC CDR1 amino acid sequence of SEQ ID NO: 45, a HC CDR2 amino acid sequence of SEQ ID NO: 46, or a HC CDR3 amino acid sequence of SEQ ID NO: 47.

[0316] In some embodiments, the anti-TCRβV antibody molecule, e.g., anti-TCRβ V6 (e.g., anti-TCRβ V6-5*01) antibody molecule comprises:

(i) a light chain variable region (VL) comprising a LC CDR1 amino acid sequence of SEQ ID NO: 51, a LC CDR2 amino acid sequence of SEQ ID NO: 52, or a LC CDR3 amino acid sequence of SEQ ID NO: 53; and/or
(ii) a heavy chain variable region (VH) comprising a HC CDR1 amino acid sequence of SEQ ID NO: 255, a HC CDR2 amino acid sequence of SEQ ID NO: 46, or a HC CDR3 amino acid sequence of SEQ ID NO: 47.

[0317] In an embodiment, the anti-TCRβV antibody molecule, e.g., anti-TCRβ V6 (e.g., anti-TCRβ V6-5*01) antibody molecule comprises:

(i) a LC CDR1 amino acid sequence of SEQ ID NO: 54, a LC CDR2 amino acid sequence of SEQ ID NO: 55, or a LC CDR3 amino acid sequence of SEQ ID NO: 56; and/or
(ii) a HC CDR1 amino acid sequence of SEQ ID NO: 48, a HC CDR2 amino acid sequence of SEQ ID NO: 49, or a HC CDR3 amino acid sequence of SEQ ID NO: 50.

[0318] In some embodiments, the anti-TCRβV antibody molecule, e.g., anti-TCRβ V6 (e.g., anti-TCRβ V6-5*01) antibody molecule comprises:

(i) a light chain variable region (VL) comprising a LC CDR1 amino acid sequence of SEQ ID NO: 54, a LC CDR2 amino acid sequence of SEQ ID NO: 55, or a LC CDR3 amino acid sequence of SEQ ID NO: 56; and/or
(ii) a heavy chain variable region (VH) comprising a HC CDR1 amino acid sequence of SEQ ID NO: 48, a HC CDR2 amino acid sequence of SEQ ID NO: 49, or a HC CDR3 amino acid sequence of SEQ ID NO: 50.

[0319] In one embodiment, the light or the heavy chain variable framework (e.g., the region encompassing at least FR1, FR2, FR3, and optionally FR4) of the anti-TCRβV antibody molecule, e.g., anti-TCRβ V6 (e.g., anti-TCRβ V6-5*01) antibody molecule can be chosen from: (a) a light or heavy chain variable framework including at least 80%, 85%, 87% 90%, 92%, 93%, 95%, 97%, 98%, or 100% of the amino acid residues from a human light or heavy chain variable framework, e.g., a light or heavy chain variable framework residue from a human mature antibody, a human germline sequence, or a human consensus sequence; (b) a light or heavy chain variable framework including from 20% to 80%, 40% to 60%, 60% to 90%, or 70% to 95% of the amino acid residues from a human light or heavy chain variable framework, e.g., a light or heavy chain variable framework residue from a human mature antibody, a human germline sequence, or a human consensus sequence; (c) a non-human framework (e.g., a rodent framework); or (d) a non-human framework that has been modified, e.g., to remove antigenic or cytotoxic determinants, e.g., deimmunized, or partially humanized. In one embodiment, the light or heavy chain variable framework region (particularly FR1, FR2 and/or FR3) includes a light or heavy chain variable framework sequence at least 70, 75, 80, 85, 87, 88, 90, 92, 94, 95, 96, 97, 98, 99% identical or identical to the frameworks of a VL or VH segment of a human germline gene.

[0320] In some embodiments, the anti-TCRβV antibody molecule, e.g., anti-TCRβ V6 (e.g., anti-TCRβ V6-5*01) antibody molecule, comprises a heavy chain variable domain having at least one, two, three, four, five, six, seven, ten, fifteen, twenty or more changes, e.g., amino acid substitutions or deletions, from an amino acid sequence of any one of A-H.1 to A-H.85, e.g., A-H.1, A-H.2 or A-H.68, e.g., the amino acid sequence of the FR region in the entire variable region, e.g., shown in FIG. 1A, or in SEQ ID NO: 9.

[0321] Alternatively, or in combination with the heavy chain substitutions described herein, the anti-TCRβV antibody molecule, e.g., anti-TCRβ V6 (e.g., anti-TCRβ V6-5*01) antibody molecule, comprises a light chain variable domain having at least one, two, three, four, five, six, seven, ten, fifteen, twenty or more amino acid changes, e.g., amino acid substitutions or deletions, from an amino acid sequence of any one of A-H.1 to A-H.85, e.g., A-H.1, A-H.2 or A-H.68, e.g., the amino acid sequence of the FR region in the entire variable region, e.g., shown in FIG. 1B, or in SEQ ID NO: 10 or SEQ ID NO: 11.

[0322] In some embodiments, the anti-TCRβV antibody molecule, e.g., anti-TCRβ V6 (e.g., anti-TCRβ V6-5*01) antibody molecule, includes one, two, three, or four heavy chain framework regions shown in FIG. 1A, or a sequence substantially identical thereto.

[0323] In some embodiments, the anti-TCRβV antibody molecule, e.g., anti-TCRβ V6 (e.g., anti-TCRβ V6-5*01) antibody molecule, includes one, two, three, or four light chain framework regions shown in FIG. 1B, or a sequence substantially identical thereto.

[0324] In some embodiments, the anti-TCRβV antibody molecule, e.g., anti-TCRβ V6 (e.g., anti-TCRβ V6-5*01) antibody molecule, comprises the light chain framework region 1 of A-H.1 or A-H.2, e.g., as shown in FIG. 1B.

[0325] In some embodiments, the anti-TCRβV antibody molecule, e.g., anti-TCRβ V6 (e.g., anti-TCRβ V6-5*01) antibody molecule, comprises the light chain framework region 2 of A-H.1 or A-H.2, e.g., as shown in FIG. 1B.

[0326] In some embodiments, the anti-TCRβV antibody molecule, e.g., anti-TCRβ V6 (e.g., anti-TCRβ V6-5*01) antibody molecule, comprises the light chain framework region 3 of A-H.1 or A-H.2, e.g., as shown in FIG. 1B.

[0327] In some embodiments, the anti-TCRβV antibody molecule, e.g., anti-TCRβ V6 (e.g., anti-TCRβ V6-5*01) antibody molecule, comprises the light chain framework region 4 of A-H.1 or A-H.2, e.g., as shown in FIG. 1B.

[0328] In some embodiments, the anti-TCRβV antibody molecule, e.g., anti-TCRβ V6 (e.g., anti-TCRβ V6-5*01) antibody molecule, comprises a light chain variable domain comprising a framework region, e.g., framework region 1 (FR1), comprising a change, e.g., a substitution (e.g., a conservative substitution) at position 10 according to Kabat numbering. In some embodiments, the FR1 comprises a Phenylalanine at position 10, e.g., a Serine to Phenyalanine substitution. In some embodiments, the substitution is relative to a human germline light chain framework region sequence.

[0329] In some embodiments, the anti-TCRβV antibody molecule, e.g., anti-TCRβ V6 (e.g., anti-TCRβ V6-5*01) antibody molecule, comprises a light chain variable domain comprising a framework region, e.g., framework region 2 (FR2), comprising a change, e.g., a substitution (e.g., a conservative substitution) at a position disclosed herein according to Kabat numbering. In some embodiments, FR2 comprises a Histidine at position 36, e.g., a substitution at position 36 according to Kabat numbering, e.g., a Tyrosine to Histidine substitution. In some embodiments, FR2 comprises an Alanine at position 46, e.g., a substitution at position 46 according to Kabat numbering, e.g., an Arginine to Alanine substitution. In some embodiments, the substitution is relative to a human germline light chain framework region sequence.

[0330] In some embodiments, the anti-TCRβV antibody molecule, e.g., anti-TCRβ V6 (e.g., anti-TCRβ V6-5*01) antibody molecule, comprises a light chain variable domain comprising a framework region, e.g., framework region 3 (FR3), comprising a change, e.g., a substitution (e.g., a conservative substitution) at a position disclosed herein according to Kabat numbering. In some embodiments, FR3 comprises a Phenyalanine at position 87, e.g., a substitution at position 87 according to Kabat numbering, e.g., a Tyrosine to Phenyalanine substitution. In some embodiments, the substitution is relative to a human germline light chain framework region sequence.

[0331] In some embodiments, the anti-TCRβV antibody molecule, e.g., anti-TCRβ V6 (e.g., anti-TCRβ V6-5*01) antibody molecule, comprises a light chain variable domain comprising: (a) a framework region 1 (FR1) comprising a Phenylalanine at position 10, e.g., a substitution at position 10 according to Kabat numbering, e.g., a Serine to Phenyalanine substitution; (b) a framework region 2 (FR2) comprising a Histidine at position 36, e.g., a substitution at position 36 according to Kabat numbering, e.g., a Tyrosine to Histidine substitution, and a Alanine at position 46, e.g., a substitution at position 46 according to Kabat numbering, e.g., a Arginine to Alanine substitution; and (c) a framework region 3 (FR3) comprising a Phenylalanine at position 87, e.g., a substitution at position 87 according to Kabat numbering, e.g., a Tyrosine to Phenyalanine substitution, e.g., as shown in the amino acid sequence of SEQ ID NO: 10. In some embodiments, the substitution is relative to a human germline light chain framework region sequence.

[0332] In some embodiments, the anti-TCRβV antibody molecule, e.g., anti-TCRβ V6 (e.g., anti-TCRβ V6-5*01) antibody molecule, comprises a light chain variable domain comprising: (a) a framework region 2 (FR2) comprising a Histidine at position 36, e.g., a substitution at position 36 according to Kabat numbering, e.g., a Tyrosine to Histidine substitution, and a Alanine at position 46, e.g., a substitution at position 46 according to Kabat numbering, e.g., a Arginine to Alanine substitution; and (b) a framework region 3 (FR3) comprising a Phenylalanine at position 87, e.g., a substitution at position 87 according to Kabat numbering, e.g., a Tyrosine to Phenyalanine substitution, e.g., as shown in the amino acid sequence of SEQ ID NO: 11. In some embodiments, the substitution is relative to a human germline light chain framework region sequence.

[0333] In some embodiments, the anti-TCRβV antibody molecule, e.g., anti-TCRβ V6 (e.g., anti-TCRβ V6-5*01) antibody molecule, comprises a light chain variable domain comprising: (a) a framework region 1 (FR1) comprising a change, e.g., a substitution (e.g., a conservative substitution) at one or more (e.g., all) positions disclosed herein according to Kabat numbering; (b) a framework region 2 (FR2) comprising a change, e.g., a substitution (e.g., a conservative substitution) at one or more (e.g., all) position disclosed herein according to Kabat numbering and (c) a framework region 3 (FR3) comprising a change, e.g., a substitution (e.g., a conservative substitution) at one or more (e.g., all) position disclosed herein according to Kabat numbering. In some embodiments, the substitution is relative to a human germline light chain framework region sequence.

[0334] In some embodiments, the anti-TCRβV antibody molecule, e.g., anti-TCRβ V6 (e.g., anti-TCRβ V6-5*01) antibody molecule, comprises the heavy chain framework region 1 of A-H.1 or A-H.2, e.g., as shown in FIG. 1A.

[0335] In some embodiments, the anti-TCRβV antibody molecule, e.g., anti-TCRβ V6 (e.g., anti-TCRβ V6-5*01) antibody molecule, comprises the heavy chain framework region 2 of A-H.1 or A-H.2, e.g., as shown in FIG. 1A

[0336] In some embodiments, the anti-TCRβV antibody molecule, e.g., anti-TCRβ V6 (e.g., anti-TCRβ V6-5*01) antibody molecule, comprises the heavy chain framework region 3 of A-H.1 or A-H.2, e.g., as shown in FIG. 1A.

[0337] In some embodiments, the anti-TCRβV antibody molecule, e.g., anti-TCRβ V6 (e.g., anti-TCRβ V6-5*01) antibody molecule, comprises the heavy chain framework region 4 of A-H.1 or A-H.2, e.g., as shown in FIG. 1A.

[0338] In some embodiments, the anti-TCRβV antibody molecule, e.g., anti-TCRβ V6 (e.g., anti-TCRβ V6-5*01) antibody molecule, comprises a heavy chain variable domain comprising a framework region, e.g., framework region 3 (FR3), comprising a change, e.g., a substitution (e.g., a conservative substitution) at a position disclosed herein according to Kabat numbering. In some embodiments, FR3 comprises a Threonine at position 73, e.g., a substitution at position 73 according to Kabat numbering, e.g., a Glutamic Acid to Threonine substitution. In some embodiments, FR3 comprises a Glycine at position 94, e.g., a substitution at position 94 according to Kabat numbering, e.g., an Arginine to Glycine substitution. In some embodiments, the substitution is relative to a human germline heavy chain framework region sequence.

[0339] In some embodiments, the anti-TCRβV antibody molecule, e.g., anti-TCRβ V6 (e.g., anti-TCRβ V6-5*01) antibody molecule, comprises a heavy chain variable domain comprising a framework region 3 (FR3) comprising a Threonine at position 73, e.g., a substitution at position 73 according to Kabat numbering, e.g., a Glutamic Acid to Threonine substitution, and a Glycine at position 94, e.g., a substitution at position 94 according to Kabat numbering, e.g., a Arginine to Glycine substitution, e.g., as shown in the amino acid sequence of SEQ ID NO: 10.

[0340] In some embodiments, the anti-TCRβV antibody molecule, e.g., anti-TCRβ V6 (e.g., anti-TCRβ V6-5*01) antibody molecule, comprises the heavy chain framework regions 1-4 of A-H.1 or A-H.2, e.g., SEQ ID NO: 9, or as shown in FIGS. 1A and 1B.

[0341] In some embodiments, the anti-TCRβV antibody molecule, e.g., anti-TCRβ V6 (e.g., anti-TCRβ V6-5*01) antibody molecule, comprises the light chain framework regions 1-4 of A-H.1, e.g., SEQ ID NO: 10, or as shown in FIGS. 1A and 1B.

[0342] In some embodiments, the anti-TCRβV antibody molecule, e.g., anti-TCRβ V6 (e.g., anti-TCRβ V6-5*01) antibody molecule, comprises the light chain framework regions 1-4 of A-H.2, e.g., SEQ ID NO: 11, or as shown in FIGS. 1A and 1B.

[0343] In some embodiments, the anti-TCRβV antibody molecule, e.g., anti-TCRβ V6 (e.g., anti-TCRβ V6-5*01) antibody molecule, comprises the heavy chain framework regions 1-4 of A-H.1, e.g., SEQ ID NO: 9; and the light chain framework regions 1-4 of A-H.1, e.g., SEQ ID NO: 10, or as shown in FIGS. 1A and 1B.

[0344] In some embodiments, the anti-TCRβV antibody molecule, e.g., anti-TCRβ V6 (e.g., anti-TCRβ V6-5*01) antibody molecule, comprises the heavy chain framework regions 1-4 of A-H.2, e.g., SEQ ID NO: 9; and the light chain framework regions 1-4 of A-H.2, e.g., SEQ ID NO: 11, or as shown in FIGS. 1A and 1B.

[0345] In some embodiments, the heavy or light chain variable domain, or both, of the anti-TCRβ V antibody molecule, e.g., anti-TCRβ V6 (e.g., anti-TCRβ V6-5*01) antibody molecule, includes an amino acid sequence, which is substantially identical to an amino acid disclosed herein, e.g., at least 80%, 85%, 90%, 92%, 95%, 97%, 98%, 99% or higher identical to a variable region of an antibody described herein, e.g., an antibody chosen from any one of A-H.1 to A-H.85, e.g., A-H.1, A-H.2 or A-H.68, or as described in TABLE 1A, or encoded by the nucleotide sequence in TABLE 1A; or which differs at least 1 or 5 residues, but less than 40, 30, 20, or 10 residues, from a variable region of an antibody described herein.

[0346] In some embodiments, the anti-TCRβV antibody molecule, e.g., anti-TCRβ V6 (e.g., anti-TCRβ V6-5*01) antibody molecule, comprises at least one, two, three, or four antigen-binding regions, e.g., variable regions, having an amino acid sequence as set forth in TABLE 1A, or a sequence substantially identical thereto (e.g., a sequence at least about 85%, 90%, 95%, 99% or more identical thereto, or which differs by no more than 1, 2, 5, 10, or 15 amino acid residues from the sequences shown in TABLE 1A. In another embodiment, the anti-TCRβV antibody molecule, e.g., anti-TCRβ V6 (e.g., anti-TCRβ V6-5*01) antibody molecule includes a VH and/or VL domain encoded by a nucleic acid having a nucleotide sequence as set forth in TABLE 1A, or a sequence substantially identical thereto (e.g., a sequence at least about 85%, 90%, 95%, 99% or more identical thereto, or which differs by no more than 3, 6, 15, 30, or 45 nucleotides from the sequences shown in TABLE 1A.

[0347] In some embodiments, the anti-TCRβV antibody molecule, e.g., anti-TCRβ V6 (e.g., anti-TCRβ V6-5*01) antibody molecule, comprises:

a VH domain comprising the amino acid sequence of SEQ ID NO: 9, an amino acid sequence at least about 85%, 90%, 95%, 99% or more identical to the amino acid sequence of SEQ ID NO: 9, or an amino acid sequence which differs by no more than 1, 2, 5, 10, or 15 amino acid residues from the amino acid sequence of SEQ ID NO: 9; and/or
a VL domain comprising the amino acid sequence of SEQ ID NO: 10, an amino acid sequence at least about 85%, 90%, 95%, 99% or more identical to the amino acid sequence of SEQ ID NO: 10, or an amino acid sequence which differs by no more than 1, 2, 5, 10, or 15 amino acid residues from the amino acid sequence of SEQ ID NO: 10.

[0348] In some embodiments, the anti-TCRβV antibody molecule, e.g., anti-TCRβ V6 (e.g., anti-TCRβ V6-5*01) antibody molecule, comprises:

a VH domain comprising the amino acid sequence of SEQ ID NO: 9, an amino acid sequence at least about 85%, 90%, 95%, 99% or more identical to the amino acid sequence of SEQ ID NO: 9, or an amino acid sequence which differs by no more than 1, 2, 5, 10, or 15 amino acid residues from the amino acid sequence of SEQ ID NO: 9; and/or
a VL domain comprising the amino acid sequence of SEQ ID NO: 11, an amino acid sequence at least about 85%, 90%, 95%, 99% or more identical to the amino acid sequence of SEQ ID NO: 11, or an amino acid sequence which differs by no more than 1, 2, 5, 10, or 15 amino acid residues from the amino acid sequence of SEQ ID NO: 11.

[0349] In some embodiments, the anti-TCRβV antibody molecule, e.g., anti-TCRβ V6 (e.g., anti-TCRβ V6-5*01) antibody molecule is a full antibody or fragment thereof (e.g., a Fab, F(ab′)₂, Fv, or a single chain Fv fragment (scFv)). In embodiments, the anti-TCRβV antibody molecule, e.g., anti-TCRβ V6 (e.g., anti-TCRβ V6-5*01) antibody molecule is a monoclonal antibody or an antibody with single specificity. In some embodiments, the anti-TCRβV antibody molecule, e.g., anti-TCRβ V6 (e.g., anti-TCRβ V6-5*01) antibody molecule, can also be a humanized, chimeric, camelid, shark, or an in vitro-generated antibody molecule. In some embodiments, the anti-TCRβV antibody molecule, e.g., anti-TCRβ V6 (e.g., anti-TCRβ V6-5*01) antibody molecule, is a humanized antibody molecule. The heavy and light chains of the anti-TCRβV antibody molecule, e.g., anti-TCRβ V6 (e.g., anti-TCRβ V6-5*01) antibody molecule, can be full-length (e.g., an antibody can include at least one, and preferably two, complete heavy chains, and at least one, and preferably two, complete light chains) or can include an antigen-binding fragment (e.g., a Fab, F(ab′)₂, Fv, a single chain Fv fragment, a single domain antibody, a diabody (dAb), a bivalent antibody, or bispecific antibody or fragment thereof, a single domain variant thereof, or a camelid antibody).

[0350] In some embodiments, the anti-TCRβV antibody molecule, e.g., anti-TCRβ V6 (e.g., anti-TCRβ V6-5*01) antibody molecule, is in the form of a multispecific molecule, e.g., a bispecific molecule, e.g., as described herein.

[0351] In some embodiments, the anti-TCRβV antibody molecule, e.g., anti-TCRβ V6 (e.g., anti-TCRβ V6-5*01) antibody molecule, has a heavy chain constant region (Fc) chosen from, e.g., the heavy chain constant regions of IgG1, IgG2, IgG3, IgG4, IgM, IgA1, IgA2, IgD, and IgE. In some embodiments, the Fc region is chosen from the heavy chain constant regions of IgG1, IgG2, IgG3, and IgG4. In some embodiments, the Fc region is chosen from the heavy chain constant region of IgG1 or IgG2 (e.g., human IgG1, or IgG2). In some embodiments, the heavy chain constant region is human IgG1. In some embodiments, the Fc region comprises a Fc region variant, e.g., as described herein.

[0352] In some embodiments, the anti-TCRβV antibody molecule, e.g., anti-TCRβ V6 (e.g., anti-TCRβ V6-5*01) antibody molecule, has a light chain constant region chosen from, e.g., the light chain constant regions of kappa or lambda, preferably kappa (e.g., human kappa). In one embodiment, the constant region is altered, e.g., mutated, to modify the properties of the anti-TCRβV antibody molecule, e.g., anti-TCRβ V6 (e.g., anti-TCRβ V6-5*01) antibody molecule (e.g., to increase or decrease one or more of: Fc receptor binding, antibody glycosylation, the number of cysteine residues, effector cell function, or complement function). For example, the constant region is mutated at positions 296 (M to Y), 298 (S to T), 300 (T to E), 477 (H to K) and 478 (N to F) to alter Fc receptor binding (e.g., the mutated positions correspond to positions 132 (M to Y), 134 (S to T), 136 (T to E), 313 (H to K) and 314 (N to F) of SEQ ID NOs: 212 or 214; or positions 135 (M to Y), 137 (S to T), 139 (T to E), 316 (H to K) and 317 (N to F) of SEQ ID NOs: 215, 216, 217 or 218), e.g., relative to human IgG1.

[0353] Antibody A-H.1 comprises a heavy chain comprising the amino acid sequence of SEQ ID NO: 3278 and a light chain comprising the amino acid sequence of SEQ ID NO: 72. Antibody A-H.2 comprises a heavy chain comprising the amino acid sequence of SEQ ID NO: 3278 and a light chain comprising the amino acid sequence of SEQ ID NO: 3279. Antibody A-H.68 comprises the amino acid sequence of SEQ ID NO: 1337, or a sequence having at least 85%, 90%, 95%, 96%, 97%, 98%, or 99% identity thereto.

[0354] Additional exemplary humanized anti-TCRB V6 antibodies are provided in TABLE 1A. In some embodiments, the anti-TCRβ V6 is antibody A, e.g., humanized antibody A (antibody A-H), as provided in TABLE 1A. In some embodiments, the anti-TCRβV antibody comprises one or more (e.g., all three) of a LC CDR1, LC CDR2, and LC CDR3 provided in TABLE 1A; and/or one or more (e.g., all three) of a HC CDR1, HC CDR2, and HC CDR3 provided in TABLE 1A, or a sequence with at least 85%, 90%, 95%, 96%, 97%, 98%, or 99% identity thereto. In some embodiments, antibody A comprises a variable heavy chain (VH) and/or a variable light chain (VL) provided in TABLE 1A, or a sequence with at least 85%, 90%, 95%, 96%, 97%, 98%, or 99% identity thereto.

[0355] In some embodiments, the anti-TCRβV antibody molecule, e.g., anti-TCRβ V6 (e.g., anti-TCRβ V6-5*01) antibody molecule comprises a VH and/or a VL of an antibody described in Table 1, or a sequence with at least 80%, 85%, 90%, 95%, 96%, 97%, 98%, 99% or more identity thereto. In some embodiments, the anti-TCRβV antibody molecule, e.g., anti-TCRβ V6 (e.g., anti-TCRβ V6-5*01) antibody molecule comprises a VH of an antibody described in Table 1, or a sequence with at least 80%, 85%, 90%, 95%, 96%, 97%, 98%, 99% or more identity thereto. In some embodiments, the anti-TCRβV antibody molecule, e.g., anti-TCRβ V6 (e.g., anti-TCRβ V6-5*01) antibody molecule comprises a VL of an antibody described in Table 1, or a sequence with at least 80%, 85%, 90%, 95%, 96%, 97%, 98%, 99% or more identity thereto.

[0356] In some embodiments, the anti-TCRβV antibody molecule, e.g., anti-TCRβ V6 (e.g., anti-TCRβ V6-5*01) antibody molecule comprises a VH and a VL of an antibody described in Table 1, or a sequence with at least 80%, 85%, 90%, 95%, 96%, 97%, 98%, 99% or more identity thereto.

[0357] In some embodiments, the anti-TCRβV antibody molecule, e.g., anti-TCRβ V6 (e.g., anti-TCRβ V6-5*01) antibody molecule comprises a VH of A-H.1, A-H.2, A-H.3, A-H.4, A-H.5, A-H.6, A-H.7, A-H.8, A-H.9, A-H.10, A-H.11, A-H.12, A-H.13, A-H.14, A-H.15, A-H.16, A-H.17, A-H.18, A-H.19, A-H.20, A-H.21, A-H.22, A-H.23, A-H.24, A-H.25, A-H.26, A-H.27, A-H.28, A-H.29, A-H.30, A-H.31, A-H.32, A-H.33, A-H.34, A-H.35, A-H.36, A-H.37, A-H.38, A-H.39, A-H.40, A-H.1, A-H.42, A-H.43, A-H.44, A-H.45, A-H.46, A-H.47, A-H.48, A-H.49, A-H.50, A-H.51, A-H.52, A-H.53, A-H.54, A-H.55, A-H.56, A-H.57, A-H.58, A-H.59, A-H.60, A-H.61, A-H.62, A-H.63, A-H.64, A-H.65, A-H.66, A-H.67, A-H.68, A-H.69, A-H.70, A-H.71, A-H.72, A-H.73, A-H.74, A-H.75, A-H.76, A-H.77, A-H.78, A-H.79, A-H.80, A-H.81, A-H.82, A-H.83, A-H.84, or A-H.85, or a sequence with at least 80%, 85%, 90%, 95%, 96%, 97%, 98%, 99% or more identity thereto.

[0358] In some embodiments, the anti-TCRβV antibody molecule, e.g., anti-TCRβ V6 (e.g., anti-TCRβ V6-5*01) antibody molecule comprises a VL of A-H.1, A-H.2, A-H.3, A-H.4, A-H.5, A-H.6, A-H.7, A-H.8, A-H.9, A-H.10, A-H.11, A-H.12, A-H.13, A-H.14, A-H.15, A-H.16, A-H.17, A-H.18, A-H.19, A-H.20, A-H.21, A-H.22, A-H.23, A-H.24, A-H.25, A-H.26, A-H.27, A-H.28, A-H.29, A-H.30, A-H.31, A-H.32, A-H.33, A-H.34, A-H.35, A-H.36, A-H.37, A-H.38, A-H.39, A-H.40, A-H.1, A-H.42, A-H.43, A-H.44, A-H.45, A-H.46, A-H.47, A-H.48, A-H.49, A-H.50, A-H.51, A-H.52, A-H.53, A-H.54, A-H.55, A-H.56, A-H.57, A-H.58, A-H.59, A-H.60, A-H.61, A-H.62, A-H.63, A-H.64, A-H.65, A-H.66, A-H.67, A-H.68, A-H.69, A-H.70, A-H.71, A-H.72, A-H.73, A-H.74, A-H.75, A-H.76, A-H.77, A-H.78, A-H.79, A-H.80, A-H.81, A-H.82, A-H.83, A-H.84, or A-H.85, or a sequence with at least 80%, 85%, 90%, 95%, 96%, 97%, 98%, 99% or more identity thereto.

[0359] In some embodiments, the anti-TCRβV antibody molecule, e.g., anti-TCRβ V6 (e.g., anti-TCRβ V6-5*01) antibody molecule comprises a VH of A-H.1, A-H.2, A-H.3, A-H.4, A-H.5, A-H.6, A-H.7, A-H.8, A-H.9, A-H.10, A-H.11, A-H.12, A-H.13, A-H.14, A-H.15, A-H.16, A-H.17, A-H.18, A-H.19, A-H.20, A-H.21, A-H.22, A-H.23, A-H.24, A-H.25, A-H.26, A-H.27, A-H.28, A-H.29, A-H.30, A-H.31, A-H.32, A-H.33, A-H.34, A-H.35, A-H.36, A-H.37, A-H.38, A-H.39, A-H.40, A-H.1, A-H.42, A-H.43, A-H.44, A-H.45, A-H.46, A-H.47, A-H.48, A-H.49, A-H.50, A-H.51, A-H.52, A-H.53, A-H.54, A-H.55, A-H.56, A-H.57, A-H.58, A-H.59, A-H.60, A-H.61, A-H.62, A-H.63, A-H.64, A-H.65, A-H.66, A-H.67, A-H.68, A-H.69, A-H.70, A-H.71, A-H.72, A-H.73, A-H.74, A-H.75, A-H.76, A-H.77, A-H.78, A-H.79, A-H.80, A-H.81, A-H.82, A-H.83, A-H.84, or A-H.85, or a sequence with at least 80%, 85%, 90%, 95%, 96%, 97%, 98%, 99% or more identity thereto; and a VL of A-H.1, A-H.2, A-H.3, A-H.4, A-H.5, A-H.6, A-H.7, A-H.8, A-H.9, A-H.10, A-H.11, A-H.12, A-H.13, A-H.14, A-H.15, A-H.16, A-H.17, A-H.18, A-H.19, A-H.20, A-H.21, A-H.22, A-H.23, A-H.24, A-H.25, A-H.26, A-H.27, A-H.28, A-H.29, A-H.30, A-H.31, A-H.32, A-H.33, A-H.34, A-H.35, A-H.36, A-H.37, A-H.38, A-H.39, A-H.40, A-H.1, A-H.42, A-H.43, A-H.44, A-H.45, A-H.46, A-H.47, A-H.48, A-H.49, A-H.50, A-H.51, A-H.52, A-H.53, A-H.54, A-H.55, A-H.56, A-H.57, A-H.58, A-H.59, A-H.60, A-H.61, A-H.62, A-H.63, A-H.64, A-H.65, A-H.66, A-H.67, A-H.68, A-H.69, A-H.70, A-H.71, A-H.72, A-H.73, A-H.74, A-H.75, A-H.76, A-H.77, A-H.78, A-H.79, A-H.80, A-H.81, A-H.82, A-H.83, A-H.84, or A-H.85, or a sequence with at least 80%, 85%, 90%, 95%, 96%, 97%, 98%, 99% or more identity thereto.

TABLE 1A
AmiNO: acid and nucleotide sequences for murine, chimeric and
humanized antibody molecules which bind to TCRVB 6, e.g., TCRVB 6-5.
The antibody molecules include murine mAb Antibody A, and humanized
mAb Antibody A-H Clones A-H.l to A-H.85. The amiNO: acid the heavy
and light chain CDRs, and the amiNO: acid and nucleotide sequences
of the heavy and light chain variable regions, and the heavy and
light chains are shown.
Antibody A (murine), also referred to as H131, binds to TCRVB 6-5

| | | |
|---|---|---|
| SEQ ID NO: 3 | HC CDR1 (Combined) | GYSFTTYYIH |
| SEQ ID NO: 4 | HC CDR2 (Combined) | WFFPGSGNIKYNEKFKG |
| SEQ ID NO: 5 | HC CDR3 (Combined) | SYYSYDVLDY |
| SEQ ID NO: 255 | HC CDR1 (Kabat) | TYYIH |
| SEQ ID NO: 46 | HC CDR2 (Kabat) | WFFPGSGNIKYNEKFKG |
| SEQ ID NO: 47 | HC CDR3 (Kabat) | SYYSYDVLDY |
| SEQ ID NO: 48 | HC CDR1 (Chothia) | GYSFTTY |
| SEQ ID NO: 49 | HC CDR2 (Chothia) | FPGSGN |
| SEQ ID NO: 50 | HC CDR3 (Chothia) | SYYSYDVLDY |
| SEQ ID NO: 1 | VH | QVQLQQSGPELVKPGTSVKISCKASGYSFTTYYIHW |
| | | VKQRPGQGLEWIGWFFPGSGNIKYNEKFKGKATLTA |
| | | DTSSSTAYMQLSSLTSEESAVYFCAGSYYSYDVLDY |
| | | WGHGTTLTVSS |
| SEQ ID NO: 6 | LC CDR1 (Combined) | KASQNVGINVV |
| SEQ ID NO: 7 | LC CDR2 (Combined) | SSSHRYS |
| SEQ ID NO: 8 | LC CDR3 (Combined) | QQFKSYPLT |
| SEQ ID NO: 51 | LC CDR1 (Kabat) | KASQNVGINVV |
| SEQ ID NO: 52 | LC CDR2 (Kabat) | SSSHRYS |
| SEQ ID NO: 53 | LC CDR3 (Kabat) | QQFKSYPLT |
| SEQ ID NO: 54 | LC CDR1 (Chothia) | KASQNVGINVV |
| SEQ ID NO: 55 | LC CDR2 (Chothia) | SSSHRYS |
| SEQ ID NO: 56 | LC CDR3 (Chothia) | QQFKSYPLT |
| SEQ ID NO: 2 | VL | DILMTQSQKFMSTSLGDRVSVSCKASQNVGINVVW |
| | | HQQKPGQSPKALIYSSSHRYSGVPDRFTGSGSGTDFT |
| | | LTINNVQSEDLAEYFCQQFKSYPLTFGAGTKLELK |

Antibody A humanized (A-H antibody)
A-H.1 antibody

| | | |
|---|---|---|
| SEQ ID NO: 3 | HC CDR1 (Combined) | gysfttyyih |
| SEQ ID NO: 4 | HC CDR2 (Combined) | WFFPGSGNIKYNEKFKG |
| SEQ ID NO: 5 | HC CDR3 (Combined) | SYYSYDVLDY |
| SEQ ID NO: 9 | VH | QVQLVQSGAEVKKPGSSVKVSCKASGYSFTTYYIHW |
| | | VRQAPGQGLEWMGWFFPGSGNIKYNEKFKGRVTIT |
| | | ADTSTSTAYMELSSLRSEDTAVYYCAGSYYSYDVLD |
| | | YWGQGTTVTVSS |
| SEQ ID NO: 12 | DNA VH | CAGGTGCAGCTGGTTCAGTCTGGCGCCGAAGTGA |
| | | AGAAACCTGGCTCCTCCGTGAAGGTGTCCTGCAAG |
| | | GCTTCCGGCTACTCCTTCACCACCTACTACATCCA |
| | | CTGGGTCCGACAGGCCCCTGGACAAGGATTGGAA |
| | | TGGATGGGCTGGTTCTTCCCCGGCTCCGGCAACAT |
| | | CAAGTACAACGAGAAGTTCAAGGGCCGCGTGACC |
| | | ATCACCGCCGACACCTCTACCTCTACCGCCTACAT |
| | | GGAACTGTCCAGCCTGAGATCTGAGGACACCGCC |
| | | GTGTACTACTGCGCCGGCTCCTACTACTCTTACGA |
| | | CGTGCTGGATTACTGGGGCCAGGGCACCACAGTG |
| | | ACAGTGTCCTCT |
| SEQ ID NO: 69 | VH-IgM constant | METDTLLLWVLLLWVPGSTGQVQLVQSGAEVKKPG |
| | delta | SSVKVSCKASGYSFTTYYIHWVRQAPGQGLEWMGW |
| | CDC | FFPGSGNIKYNEKFKGRVTITADTSTSTAYMELSSLR |
| | | SEDTAVYYCAGSYYSYDVLDYWGQGTTVTVSSGSA |
| | | SAPTLFPLVSCENSPSDTSSVAVGCLAQDFLPDSITFS |
| | | WKYKNNSDISSTRGFPSVLRGGKYAATSQVLLPSKD |
| | | VMQGTDEHVVCKVQHPNGNKEKNVPLPVIAELPPK |
| | | VSVFVPPRDGFFGNPRKSKLICQATGFSPRQIQVSWL |
| | | REGKQVGSGVTTDQVQAEAKESGPTTYKVTSTLTIK |
| | | ESDWLGQSMFTCRVDHRGLTFQQNASSMCVPDQDTA |
| | | IRVFAIPPSFASIFLTKSTKLTCLVTDLTTYDSVTISW |
| | | TRQNGEAVKTHTNISESHPNATFSAVGEASICEDDW |
| | | NSGERFTCTVTHTDLASSLKQTISRPKGVALHRPDVY |
| | | LLPPAREQLNLRESATITCLVTGFSPADVFVQWMQR |
| | | GQPLSPEKYVTSAPMPEPQAPGRYFAHSILTVSEEEW |
| | | NTGETYTCVVAHEALPNRVTERTVDKSTGKPTLYNV |
| | | SLVMSDTAGTCY |
| SEQ ID NO: 70 | VH-IgGAl | METDTLLLWVLLLWVPGSTGQVQLVQSGAEVKKPG |
| | | SSVKVSCKASGYSFTTYYIHWVRQAPGQGLEWMGW |
| | | FFPGSGNIKYNEKFKGRVTITADTSTSTAYMELSSLR |
| | | SEDTAVYYCAGSYYSYDVLDYWGQGTTVTVSSASP |
| | | TSPKVFPLSLCSTQPDGNVVIACLVQGFFPQEPLSVT |
| | | WSESGQGVTARNFPPSQDASGDLYTTSSQLTLPATQ |
| | | CLAGKSVTCHVKHYTNPSQDVTVPCPVPSTPPTPSPS |
| | | TPPTPSPSCCHPRLSLHRPALEDLLLGSEANLTCTLTG |
| | | LRDASGVTFTWTPSSGKSAVQGPPERDLCGCYSVSS |
| | | VLPGCAEPWNHGKTFTCTAAYPESKTPLTATLSKSG |
| | | NTFRPEVHLLPPPSEELALNELVTLTCLARGFSPKDV |
| | | LVRWLQGSQELPREKYLTWASRQEPSQGTTTFAVTS |
| | | ILRVAAEDWKKGDTFSCMVGHEALPLAFTQKTIDRL |
| | | AGKPTHVNVSVVMAEVDGTCY |
| SEQ ID NO: 71 | VH-IgGA2 | METDTLLLWVLLLWVPGSTGQVQLVQSGAEVKKPG |
| | | SSVKVSCKASGYSFTTYYIHWVRQAPGQGLEWMGW |
| | | FFPGSGNIKYNEKFKGRVTITADTSTSTAYMELSSLR |
| | | SEDTAVYYCAGSYYSYDVLDYWGQGTTVTVSSASP |
| | | TSPKVFPLSLDSTPQDGNVVVACLVQGFFPQEPLSVT |
| | | WSESGQNVTARNFPPSQDASGDLYTTSSQLTLPATQ |
| | | CPDGKSVTCHVKHYTNSSQDVTVPCRVPPPPPCCHP |
| | | RLSLHRPALEDLLLGSEANLTCTLTGLRDASGATFT |
| | | WTPSSGKSAVQGPPERDLCGCYSVSSVLPGCAQPWN |
| | | HGETFTCTAAHPELKTPLTANITKSGNTFRPEVHLLP |
| | | PPSEELALNELVTLTCLARGFSPKDVLVRWLQGSQE |
| | | LPREKYLTWASRQEPSQGTTTYAVTSILRVAAEDWK |
| | | KGETFSCMVGHEALPLAFTQKTIDRMAGKPTHINVS |
| | | VVMAEADGTCY |
| SEQ ID NO: | Heavy chain | METDTLLLWVLLLWVPGSTGQVQLVQSGAEVKKPG |
| 3278 | | SSVKVSCKASGYSFTTYYIHWVRQAPGQGLEWMGW |
| | | FFPGSGNIKYNEKFKGRVTITADTSTSTAYMELSSLR |
| | | SEDTAVYYCAGSYYSYDVLDYWGQGTTVTVSSAST |
| | | KGPSVFPLAPSSKSTSGGTAALGCLVKDYFPEPVTVS |
| | | WNSGALTSGVHTFPAVLQSSGLYSLSSVVTVPSSSLG |
| | | TQTYICNVNHKPSNTKVDKRVEPKSCDKTHTCPPCP |
| | | APELLGGPSVFLFPPKPKDTLMISRTPEVTCVVVDVS |
| | | HEDPEVKFNWYVDGVEVHNAKTKPREEQYNSTYRV |
| | | VSVLTVLHQDWLNGKEYKCKVSNKALPAPIEKTISK |
| | | AKGQPREPQVYTLPPSREEMTKNQVSLTCLVKGFYP |
| | | SDIAVEWESNGQPENNYKTTPPVLDSDGSFFLYSKLT |
| | | VDKSRWQQGNVFSCSVMHEALHNHYTQKSLSLSPG |
| | | K |
| SEQ ID NO: 6 | LC CDR1 (Combined) | KASQNVGINVV |
| SEQ ID NO: 7 | LC CDR2 (Combined) | SSSHRYS |
| SEQ ID NO: 8 | LC CDR3 (Combined) | QQFKSYPLT |
| SEQ ID NO: 10 | VL | DIQMTQSPSFLSASVGDRVTITCKASQNVGINVVWH |
| | | QQKPGKAPKALIYSSSHRYSGVPSRFSGSGSGTEFTL |
| | | TISSLQPEDFATYFCQQFKSYPLTFGQGTKLEIK |
| SEQ ID NO: 13 | DNA VL | GACATCCAGATGACCCAGTCTCCATCCTTCCTGTC |
| | | CGCCTCTGTGGGCGACAGAGTGACCATCACATGCA |
| | | AGGCCTCTCAGAACGTGGGCATCAACGTCGTGTGG |
| | | CACCAGCAGAAGCCTGGCAAGGCTCCTAAGGCTC |
| | | TGATCTACTCCTCCAGCCACCGGTACTCTGGCGTG |
| | | CCCTCTAGATTTTCCGGCTCTGGCTCTGGCACCGA |
| | | GTTTACCCTGACAATCTCCAGCCTGCAGCCTGAGG |
| | | ACTTCGCCACCTACTTTTGCCAGCAGTTCAAGAGC |
| | | TACCCTCTGACCTTTGGCCAGGGCACCAAGCTGGA |
| | | AATCAAG |
| SEQ ID NO: 72 | VL and kappa | METDTLLLWVLLLWVPGSTGDIQMTQSPSFLSASVG |
| | constant region/ | DRVTITCKASQNVGINVVWHQQKPGKAPKALIYSSS |
| | light chain | HRYSGVPSRFSGSGSGTEFTLTISSLQPEDFATYFCQQ |
| | | FKSYPLTFGQGTKLEIKRTVAAPSVFIFPPSDEQLKSG |
| | | TASVVCLLNNFYPREAKVQWKVDNALQSGNSQESV |
| | | TEQDSKDSTYSLSSTLTLSKADYEKHKVYACEVTHQ |
| | | GLSSPVTKSFNRGEC |

A-H.2 antibody

| | | |
|---|---|---|
| SEQ ID NO: 3 | HC CDR1 (Combined) | GYSFTTYYIH |
| SEQ ID NO: 4 | HC CDR2 (Combined) | WFFPGSGNIKYNEKFKG |
| SEQ ID NO: 5 | HC CDR3 (Combined) | SYYSYDVLDY |
| SEQ ID NO: 9 | VH | QVQLVQSGAEVKKPGSSVKVSCKASGYSFTTYYIHW |
| | | VRQAPGQGLEWMGWFFPGSGNIKYNEKFKGRVTIT |
| | | ADTSTSTAYMELSSLRSEDTAVYYCAGSYYSYDVLD |
| | | YWGQGTTVTVSS |
| SEQ ID NO: 12 | DNA VH | CAGGTGCAGCTGGTTCAGTCTGGCGCCGAAGTGA |
| | | AGAAACCTGGCTCCTCCGTGAAGGTGTCCTGCAAG |
| | | GCTTCCGGCTACTCCTTCACCACCTACTACATCCA |
| | | CTGGGTCCGACAGGCCCCTGGACAAGGATTGGAA |
| | | TGGATGGGCTGGTTCTTCCCCGGCTCCGGCAACAT |
| | | CAAGTACAACGAGAAGTTCAAGGGCCGCGTGACC |
| | | ATCACCGCCGACACCTCTACCTCTACCGCCTACAT |
| | | GGAACTGTCCAGCCTGAGATCTGAGGACACCGCC |
| | | GTGTACTACTGCGCCGGCTCCTACTACTCTTACGA |
| | | CGTGCTGGATTACTGGGGCCAGGGCACCACAGTG |
| | | ACAGTGTCCTCT |
| SEQ ID NO: | Heavy chain | METDTLLLWVLLLWVPGSTGQVQLVQSGAEVKKPG |
| 3278 | | SSVKVSCKASGYSFTTYYIHWVRQAPGQGLEWMGW |
| | | FFPGSGNIKYNEKFKGRVTITADTSTSTAYMELSSLR |
| | | SEDTAVYYCAGSYYSYDVLDYWGQGTTVTVSSAST |
| | | KGPSVFPLAPSSKSTSGGTAALGCLVKDYFPEPVTVS |
| | | WNSGALTSGVHTFPAVLQSSGLYSLSSVVTVPSSSLG |
| | | TQTYICNVNHKPSNTKVDKRVEPKSCDKTHTCPPCP |
| | | APELLGGPSVFLFPPKPKDTLMISRTPEVTCVVVDVS |
| | | HEDPEVKFNWYVDGVEVHNAKTKPREEQYNSTYRV |
| | | VSVLTVLHQDWLNGKEYKCKVSNKALPAPIEKTISK |
| | | AKGQPREPQVYTLPPSREEMTKNQVSLTCLVKGFYP |
| | | SDIAVEWESNGQPENNYKTTPPVLDSDGSFFLYSKLT |
| | | VDKSRWQQGNVFSCSVMHEALHNHYTQKSLSLSPG |
| | | K |
| SEQ ID NO: 6 | LC CDR1 (Combined) | KASQNVGINVV |
| SEQ ID NO: 7 | LC CDR2 (Combined) | SSSHRYS |
| SEQ ID NO: 8 | LC CDR3 (Combined) | QQFKSYPLT |
| SEQ ID NO: 11 | VL | DIQMTQSPSSLSASVGDRVTITCKASQNVGINVVWH |
| | | QQKPGKVPKALIYSSSHRYSGVPSRFSGSGSGTDFTL |
| | | TISSLQPEDVATYFCQQFKSYPLTFGQGTKLEIK |
| SEQ ID NO: 14 | DNA VL | GACATCCAGATGACCCAGTCTCCATCCTCTCTGTC |
| | | CGCCTCTGTGGGCGACAGAGTGACCATCACATGCA |
| | | AGGCCTCTCAGAACGTGGGCATCAACGTCGTGTGG |
| | | CACCAGCAGAAACCTGGCAAGGTGCCCAAGGCTC |
| | | TGATCTACTCCTCCAGCCACAGATACTCCGGCGTG |
| | | CCCTCTAGATTCTCCGGCTCTGGCTCTGGCACCGA |
| | | CTTTACCCTGACAATCTCCAGCCTGCAGCCTGAGG |
| | | ACGTGGCCACCTACTTTTGCCAGCAGTTCAAGAGC |
| | | TACCCTCTGACCTTTGGCCAGGGCACCAAGCTGGA |
| | | AATCAAG |
| SEQ ID NO: | Light chain | METDTLLLWVLLLWVPGSTGDIQMTQSPSSLSASVG |
| 3279 | | DRVTITCKASQNVGINVVWHQQKPGKVPKALIYSSS |
| | | HRYSGVPSRFSGSGSGTDFTLTISSLQPEDVATYFCQ |
| | | QFKSYPLTFGQGTKLEIKRTVAAPSVFIFPPSDEQLKS |
| | | GTASVVCLLNNFYPREAKVQWKVDNALQSGNSQES |
| | | VTEQDSKDSTYSLSSTLTLSKADYEKHKVYACEVTH |
| | | QGLSSPVTKSFNRGEC |

A-H.3 antibody

| | | |
|---|---|---|
| SEQ ID NO: 80 | VH + VL | QVQLVQSGAEVKKPGSSVKVSCKASGTDFKLTYIH |
| | | WVRQAPGQGLEWMGRVSPGSGNTKYNEKFKGRVTI |
| | | TADTSTSTAYMELSSLRSEDTAVYYCAGSYYSYDVL |
| | | DYWGQGTTVTVSSGGGGSGGGGSGGGGSGGGGSDI |
| | | QMTQSPSFLSASVGDRVTITCKASQNVEDRVAWYQ |
| | | QKPGKAPKALIYSSSHRYKGVPSRFSGSGSGTEFTLTI |
| | | SSLQPEDFATYFCQQFKSYPLTFGQGTKLEIK |
| SEQ ID NO: 81 | VL | DIQMTQSPSFLSASVGDRVTITCKASQNVEDRVAWY |
| | | QQKPGKAPKALIYSSSHRYKGVPSRFSGSGSGTEFTL |
| | | TISSLQPEDFATYFCQQFKSYPLTFGQGTKLEIK |
| SEQ ID NO: 82 | VH | QVQLVQSGAEVKKPGSSVKVSCKASGTDFKLTYIH |
| | | WVRQAPGQGLEWMGRVSPGSGNTKYNEKFKGRVTI |
| | | TADTSTSTAYMELSSLRSEDTAVYYCAGSYYSYDVL |
| | | DYWGQGTTVTVSS |

A-H.4

| | | |
|---|---|---|
| SEQ ID NO: 83 | VH + VL | QVQLVQSGAEVKKPGSSVKVSCKASGTDFDKIYIHW |
| | | VRQAPGQGLEWMGRISAGSGNVKYNEKFKGRVTIT |
| | | ADTSTSTAYMELSSLRSEDTAVYYCAGSYYSYDVLD |
| | | YWGQGTTVTVSSGGGGSGGGGSGGGGSGGGGSDIQ |
| | | MTQSPSFLSASVGDRVTITCKASQNVEDRVAWYQQ |
| | | KPGKAPKALIYSSSHRYKGVPSRFSGSGSGTEFTLTIS |
| | | SLQPEDFATYFCQQFKSYPLTFGQGTKLEIK |
| SEQ ID NO: 84 | VL | DIQMTQSPSFLSASVGDRVTITCKASQNVEDRVAWY |
| | | QQKPGKAPKALIYSSSHRYKGVPSRFSGSGSGTEFTL |
| | | TISSLQPEDFATYFCQQFKSYPLTFGQGTKLEIK |
| SEQ ID NO: 85 | VH | QVQLVQSGAEVKKPGSSVKVSCKASGTDFDKIYIHW |
| | | VRQAPGQGLEWMGRISAGSGNVKYNEKFKGRVTIT |
| | | ADTSTSTAYMELSSLRSEDTAVYYCAGSYYSYDVLD |
| | | YWGQGTTVTVSS |

A-H.5

| | | |
|---|---|---|
| SEQ ID NO: 86 | VH + VL | QVQLVQSGAEVKKPGSSVKVSCKASGHDFRDFYIH |
| | | WVRQAPGQGLEWMGRVYPGSGSYRYNEKFKGRVTI |
| | | TADTSTSTAYMELSSLRSEDTAVYYCAGSYYSYDVL |
| | | DYWGQGTTVTVSSGGGGSGGGGSGGGGSGGGGSDI |
| | | QMTQSPSFLSASVGDRVTITCKASQNVDDRVAWYQ |
| | | QKPGKAPKALIYSSSHRYKGVPSRFSGSGSGTEFTLTI |
| | | SSLQPEDFATYFCQQFKSYPLTFGQGTKLEIK |
| SEQ ID NO: 87 | VL | DIQMTQSPSFLSASVGDRVTITCKASQNVDDRVAWY |
| | | QQKPGKAPKALIYSSSHRYKGVPSRFSGSGSGTEFTL |
| | | TISSLQPEDFATYFCQQFKSYPLTFGQGTKLEIK |
| SEQ ID NO: 88 | VH | QVQLVQSGAEVKKPGSSVKVSCKASGHDFRDFYIH |
| | | WVRQAPGQGLEWMGRVYPGSGSYRYNEKFKGRVTI |
| | | TADTSTSTAYMELSSLRSEDTAVYYCAGSYYSYDVL |
| | | DYWGQGTTVTVSS |

A-H.6

| | | |
|---|---|---|
| SEQ ID NO: 89 | VH + VL | QVQLVQSGAEVKKPGSSVKVSCKASGHDFKLTYIH |
| | | WVRQAPGQGLEWMGRISAGSGNVKYNEKFKGRVTI |
| | | TADTSTSTAYMELSSLRSEDTAVYYCAGSYYSYDVL |
| | | DYWGQGTTVTVSSGGGGSGGGGSGGGGSGGGGSDI |
| | | QMTQSPSFLSASVGDRVTITCKASQNVDNRVAWYQ |
| | | QKPGKAPKALIYSSSHRYKGVPSRFSGSGSGTEFTLTI |
| | | SSLQPEDFATYFCQQFKSYPLTFGQGTKLEIK |
| SEQ ID NO: 90 | VL | DIQMTQSPSFLSASVGDRVTITCKASQNVDNRVAWY |
| | | QQKPGKAPKALIYSSSHRYKGVPSRFSGSGSGTEFTL |
| | | TISSLQPEDFATYFCQQFKSYPLTFGQGTKLEIK |
| SEQ ID NO: 91 | VH | QVQLVQSGAEVKKPGSSVKVSCKASGHDFKLTYIH |
| | | WVRQAPGQGLEWMGRISAGSGNVKYNEKFKGRVTI |
| | | TADTSTSTAYMELSSLRSEDTAVYYCAGSYYSYDVL |
| | | DYWGQGTTVTVSS |

A-H.7

| | | |
|---|---|---|
| SEQ ID NO: 92 | VH + VL | QVQLVQSGAEVKKPGSSVKVSCKASGTDFKLTYIH |
| | | WVRQAPGQGLEWMGRIFPGSGNVKYNEKFKGRVTI |
| | | TADTSTSTAYMELSSLRSEDTAVYYCAGSYYSYDVL |
| | | DYWGQGTTVTVSSGGGGSGGGGSGGGGSGGGGSDI |
| | | QMTQSPSFLSASVGDRVTITCKASQNVENKVAWHQ |
| | | QKPGKAPKALIYSSSHRYKGVPSRFSGSGSGTEFTLTI |
| | | SSLQPEDFATYFCQQFKSYPLTFGQGTKLEIK |
| SEQ ID NO: 93 | VL | DIQMTQSPSFLSASVGDRVTITCKASQNVENKVAWH |
| | | QQKPGKAPKALIYSSSHRYKGVPSRFSGSGSGTEFTL |
| | | TISSLQPEDFATYFCQQFKSYPLTFGQGTKLEIK |
| SEQ ID NO: 94 | VH | QVQLVQSGAEVKKPGSSVKVSCKASGTDFKLTYIH |
| | | WVRQAPGQGLEWMGRIFPGSGNVKYNEKFKGRVTI |
| | | TADTSTSTAYMELSSLRSEDTAVYYCAGSYYSYDVL |
| | | DYWGQGTTVTVSS |

A-H.8

| | | |
|---|---|---|
| SEQ ID NO: 95 | VH + VL | QVQLVQSGAEVKKPGSSVKVSCKASGTDFDKIYIHW |
| | | VRQAPGQGLEWMGRIFAGSGNTKYNEKFKGRVTIT |
| | | ADTSTSTAYMELSSLRSEDTAVYYCAGSYYSYDVLD |
| | | YWGQGTTVTVSSGGGGSGGGGSGGGGSGGGGSDIQ |
| | | MTQSPSFLSASVGDRVTITCKASQNVDDRVAWYQQ |
| | | KPGKAPKALIYSSSHRYKGVPSRFSGSGSGTEFTLTIS |
| | | SLQPEDFATYFCQQFKSYPLTFGQGTKLEIK |
| SEQ ID NO: 96 | VL | DIQMTQSPSFLSASVGDRVTITCKASQNVDDRVAWY |
| | | QQKPGKAPKALIYSSSHRYKGVPSRFSGSGSGTEFTL |
| | | TISSLQPEDFATYFCQQFKSYPLTFGQGTKLEIK |
| SEQ ID NO: 97 | VH | QVQLVQSGAEVKKPGSSVKVSCKASGTDFDKIYIHW |
| | | VRQAPGQGLEWMGRIFAGSGNTKYNEKFKGRVTIT |
| | | ADTSTSTAYMELSSLRSEDTAVYYCAGSYYSYDVLD |
| | | YWGQGTTVTVSS |

A-H.9

| | | |
|---|---|---|
| SEQ ID NO: 98 | VH + VL | QVQLVQSGAEVKKPGSSVKVSCKASGHDFDKFYIH |
| | | WVRQAPGQGLEWMGRVSAGSGNVKYNEKFKGRVT |
| | | ITADTSTSTAYMELSSLRSEDTAVYYCAGSYYSYDV |
| | | LDYWGQGTTVTVSSGGGGSGGGGSGGGGSGGGGS |
| | | DIQMTQSPSFLSASVGDRVTITCKASQNVGNRVAWY |
| | | QQKPGKAPKALIYSSSHRYSGVPSRFSGSGSGTEFTL |
| | | TISSLQPEDFATYFCQQFKSYPLTFGQGTKLEIK |
| SEQ ID NO: 99 | VL | DIQMTQSPSFLSASVGDRVTITCKASQNVGNRVAWY |
| | | QQKPGKAPKALIYSSSHRYSGVPSRFSGSGSGTEFTL |
| | | TISSLQPEDFATYFCQQFKSYPLTFGQGTKLEIK |
| SEQ ID NO: 100 | VH | QVQLVQSGAEVKKPGSSVKVSCKASGHDFDKFYIH |
| | | WVRQAPGQGLEWMGRVSAGSGNVKYNEKFKGRVT |
| | | ITADTSTSTAYMELSSLRSEDTAVYYCAGSYYSYDV |
| | | LDYWGQGTTVTVSs |

A-H.10

| | | |
|---|---|---|
| SEQ ID NO: 101 | VH + VL | QVQLVQSGAEVKKPGSSVKVSCKASGHDFDKFYIH |
| | | WVRQAPGQGLEWMGRIFAGSGNVKYNEKFKGRVTI |
| | | TADTSTSTAYMELSSLRSEDTAVYYCAGSYYSYDVL |
| | | DYWGQGTTVTVSSGGGGSGGGGSGGGGSGGGGSDI |
| | | QMTQSPSFLSASVGDRVTITCKASQNVGDRVAWYQ |
| | | QKPGKAPKALIYSSSHRYKGVPSRFSGSGSGTEFTLTI |
| | | SSLQPEDFATYFCQQFKSYPLTFGQGTKLEIKs |
| SEQ ID NO: 102 | VL | DIQMTQSPSFLSASVGDRVTITCKASQNVGDRVAWY |
| | | QQKPGKAPKALIYSSSHRYKGVPSRFSGSGSGTEFTL |
| | | TISSLQPEDFATYFCQQFKSYPLTFGQGTKLEIK |
| SEQ ID NO: 103 | VH | QVQLVQSGAEVKKPGSSVKVSCKASGHDFDKFYIH |
| | | WVRQAPGQGLEWMGRIFAGSGNVKYNEKFKGRVTI |
| | | TADTSTSTAYMELSSLRSEDTAVYYCAGSYYSYDVL |
| | | DYWGQGTTVTVSS |

A-H.11

| | | |
|---|---|---|
| SEQ ID NO: 104 | VH + VL | QVQLVQSGAEVKKPGSSVKVSCKASGTDFKLTYIH |
| | | WVRQAPGQGLEWMGRVSPGSGNVKYNEKFKGRVT |
| | | ITADTSTSTAYMELSSLRSEDTAVYYCAGSYYSYDV |
| | | LDYWGQGTTVTVSSGGGGSGGGGSGGGGSGGGGS |
| | | DIQMTQSPSFLSASVGDRVTITCKASQNVGDRVAWY |
| | | QQKPGKAPKALIYSSSHRYKGVPSRFSGSGSGTEFTL |
| | | TISSLQPEDFATYFCQQFKSYPLTFGQGTKLEIK |
| SEQ ID NO: 105 | VL | DIQMTQSPSFLSASVGDRVTITCKASQNVGDRVAWY |
| | | QQKPGKAPKALIYSSSHRYKGVPSRFSGSGSGTEFTL |
| | | TISSLQPEDFATYFCQQFKSYPLTFGQGTKLEIK |
| SEQ ID NO: 106 | VH | QVQLVQSGAEVKKPGSSVKVSCKASGTDFKLTYIH |
| | | WVRQAPGQGLEWMGRVSPGSGNVKYNEKFKGRVT |
| | | ITADTSTSTAYMELSSLRSEDTAVYYCAGSYYSYDV |
| | | LDYWGQGTTVTVSS |

A-H.12

| | | |
|---|---|---|
| SEQ ID NO: 107 | VH + VL | QVQLVQSGAEVKKPGSSVKVSCKASGTDFDKIYIHW |
| | | VRQAPGQGLEWMGRVSAGSGNTKYNEKFKGRVTIT |
| | | ADTSTSTAYMELSSLRSEDTAVYYCAGSYYSYDVLD |
| | | YWGQGTTVTVSSGGGGSGGGGSGGGGSGGGGSDIQ |
| | | MTQSPSFLSASVGDRVTITCKASQNVGNRVAWYQQ |
| | | KPGKAPKALIYSSSHRYKGVPSRFSGSGSGTEFTLTIS |
| | | SLQPEDFATYFCQQFKSYPLTFGQGTKLEIK |
| SEQ ID NO: 108 | VL | DIQMTQSPSFLSASVGDRVTITCKASQNVGNRVAWY |
| | | QQKPGKAPKALIYSSSHRYKGVPSRFSGSGSGTEFTL |
| | | TISSLQPEDFATYFCQQFKSYPLTFGQGTKLEIK |
| SEQ ID NO: 109 | VH | QVQLVQSGAEVKKPGSSVKVSCKASGTDFDKIYIHW |
| | | VRQAPGQGLEWMGRVSAGSGNTKYNEKFKGRVTIT |
| | | ADTSTSTAYMELSSLRSEDTAVYYCAGSYYSYDVLD |
| | | YWGQGTTVTVSS |

A-H.13 (also referred to as A-H.69)

| | | |
|---|---|---|
| SEQ ID NO: 110 | VH + VL | QVQLVQSGAEVKKPGSSVKVSCKASGTDFKLTYIH |
| | | WVRQAPGQGLEWMGRIFPGSGNVKYNEKFKGRVTI |
| | | TADTSTSTAYMELSSLRSEDTAVYYCAGSYYSYDVL |
| | | DYWGQGTTVTVSSGGGGSGGGGSGGGGSGGGGSDI |
| | | QMTQSPSFLSASVGDRVTITCKASQNVDNRVAWYQ |
| | | QKPGKAPKALIYSSSHRYKGVPSRFSGSGSGTEFTLTI |
| | | SSLQPEDFATYFCQQFKSYPLTFGQGTKLEIK |
| SEQ ID NO: 111 | VL | DIQMTQSPSFLSASVGDRVTITCKASQNVDNRVAWY |
| | | QQKPGKAPKALIYSSSHRYKGVPSRFSGSGSGTEFTL |
| | | TISSLQPEDFATYFCQQFKSYPLTFGQGTKLEIK |
| SEQ ID NO: 112 | VH | QVQLVQSGAEVKKPGSSVKVSCKASGTDFKLTYIH |
| | | WVRQAPGQGLEWMGRIFPGSGNVKYNEKFKGRVTI |
| | | TADTSTSTAYMELSSLRSEDTAVYYCAGSYYSYDVL |
| | | DYWGQGTTVTVSS |

A-H.14

| | | |
|---|---|---|
| SEQ ID NO: 113 | VH + VL | QVQLVQSGAEVKKPGSSVKVSCKASGTDFDKIYIHW |
| | | VRQAPGQGLEWMGRISAGSGNTKYNEKFKGRVTIT |
| | | ADTSTSTAYMELSSLRSEDTAVYYCAGSYYSYDVLD |
| | | YWGQGTTVTVSSGGGGSGGGGSGGGGSGGGGSDIQ |
| | | MTQSPSFLSASVGDRVTITCKASQNVDDRVAWYQQ |
| | | KPGKAPKALIYSSSHRYKGVPSRFSGSGSGTEFTLTIS |
| | | SLQPEDFATYFCQQFKSYPLTFGQGTKLEIK |
| SEQ ID NO: 114 | VL | DIQMTQSPSFLSASVGDRVTITCKASQNVDDRVAWY |
| | | QQKPGKAPKALIYSSSHRYKGVPSRFSGSGSGTEFTL |
| | | TISSLQPEDFATYFCQQFKSYPLTFGQGTKLEIK |
| SEQ ID NO: 115 | VH | QVQLVQSGAEVKKPGSSVKVSCKASGTDFDKIYIHW |
| | | VRQAPGQGLEWMGRISAGSGNTKYNEKFKGRVTIT |
| | | ADTSTSTAYMELSSLRSEDTAVYYCAGSYYSYDVLD |
| | | YWGQGTTVTVSS |

A-H.15

| | | |
|---|---|---|
| SEQ ID NO: 116 | VH + VL | QVQLVQSGAEVKKPGSSVKVSCKASGTDFRLTYIHW |
| | | VRQAPGQGLEWMGRVSPGSGNTKYNEKFKGRVTIT |
| | | ADTSTSTAYMELSSLRSEDTAVYYCAGSYYSYDVLD |
| | | YWGQGTTVTVSSGGGGSGGGGSGGGGSGGGGSDIQ |
| | | MTQSPSFLSASVGDRVTITCKASQNVDNKVAWHQQ |
| | | KPGKAPKALIYSSSHRYKGVPSRFSGSGSGTEFTLTIS |
| | | SLQPEDFATYFCQQFKSYPLTFGQGTKLEIK |
| SEQ ID NO: 117 | VL | DIQMTQSPSFLSASVGDRVTITCKASQNVDNKVAWH |
| | | QQKPGKAPKALIYSSSHRYKGVPSRFSGSGSGTEFTL |
| | | TISSLQPEDFATYFCQQFKSYPLTFGQGTKLEIK |
| SEQ ID NO: 118 | VH | QVQLVQSGAEVKKPGSSVKVSCKASGTDFRLTYIHW |
| | | VRQAPGQGLEWMGRVSPGSGNTKYNEKFKGRVTIT |
| | | ADTSTSTAYMELSSLRSEDTAVYYCAGSYYSYDVLD |
| | | YWGQGTTVTVSS |

A-H.16

| | | |
|---|---|---|
| SEQ ID NO: 119 | VH + VL | QVQLVQSGAEVKKPGSSVKVSCKASGGTFRLTYIHW |
| | | VRQAPGQGLEWMGRVYPGSGNTKYNEKFKGRVTIT |
| | | ADTSTSTAYMELSSLRSEDTAVYYCAGSYYSYDVLD |
| | | YWGQGTTVTVSSGGGGSGGGGSGGGGSGGGGSDIQ |
| | | MTQSPSFLSASVGDRVTITCKASQNVDDRVAWYQQ |
| | | KPGKAPKALIYSSSHRYKGVPSRFSGSGSGTEFTLTIS |
| | | SLQPEDFATYFCQQFKSYPLTFGQGTKLEIK |
| SEQ ID NO: 120 | VL | DIQMTQSPSFLSASVGDRVTITCKASQNVDDRVAWY |
| | | QQKPGKAPKALIYSSSHRYKGVPSRFSGSGSGTEFTL |
| | | TISSLQPEDFATYFCQQFKSYPLTFGQGTKLEIK |
| SEQ ID NO: 121 | VH | QVQLVQSGAEVKKPGSSVKVSCKASGGTFRLTYIHW |
| | | VRQAPGQGLEWMGRVYPGSGNTKYNEKFKGRVTIT |
| | | ADTSTSTAYMELSSLRSEDTAVYYCAGSYYSYDVLD |
| | | YWGQGTTVTVSS |

A-H.17

| | | |
|---|---|---|
| SEQ ID NO: 122 | VH + VL | QVQLVQSGAEVKKPGSSVKVSCKASGTDFRLTYIHW |
| | | VRQAPGQGLEWMGRIFPGSGNTKYNEKFKGRVTITA |
| | | DTSTSTAYMELSSLRSEDTAVYYCAGSYYSYDVLDY |
| | | WGQGTTVTVSSGGGGSGGGGSGGGGSGGGGSDIQM |
| | | TQSPSFLSASVGDRVTITCKASQNVDDRVAWYQQKP |
| | | GKAPKALIYSSSHRYKGVPSRFSGSGSGTEFTLTISSL |
| | | QPEDFATYFCQQFKSYPLTFGQGTKLEIK |
| SEQ ID NO: 123 | VL | DIQMTQSPSFLSASVGDRVTITCKASQNVDDRVAWY |
| | | QQKPGKAPKALIYSSSHRYKGVPSRFSGSGSGTEFTL |
| | | TISSLQPEDFATYFCQQFKSYPLTFGQGTKLEIK |
| SEQ ID NO: 124 | VH | QVQLVQSGAEVKKPGSSVKVSCKASGTDFRLTYIHW |
| | | VRQAPGQGLEWMGRIFPGSGNTKYNEKFKGRVTITA |
| | | DTSTSTAYMELSSLRSEDTAVYYCAGSYYSYDVLDY |
| | | WGQGTTVTVSS |

A-H.18

| | | |
|---|---|---|
| SEQ ID NO: 125 | VH + VL | QVQLVQSGAEVKKPGSSVKVSCKASGTDFKLTYIH |
| | | WVRQAPGQGLEWMGRIFPGSGNVKYNEKFKGRVTI |
| | | TADTSTSTAYMELSSLRSEDTAVYYCAGSYYSYDVL |
| | | DYWGQGTTVTVSSGGGGSGGGGSGGGGSGGGGSDI |
| | | QMTQSPSFLSASVGDRVTITCKASQNVEDRVAWYQ |
| | | QKPGKAPKALIYSSSHRYKGVPSRFSGSGSGTEFTLTI |
| | | SSLQPEDFATYFCQQFKSYPLTFGQGTKLEIK |
| SEQ ID NO: 126 | VL | DIQMTQSPSFLSASVGDRVTITCKASQNVEDRVAWY |
| | | QQKPGKAPKALIYSSSHRYKGVPSRFSGSGSGTEFTL |
| | | TISSLQPEDFATYFCQQFKSYPLTFGQGTKLEIK |
| SEQ ID NO: 127 | VH | QVQLVQSGAEVKKPGSSVKVSCKASGTDFKLTYIH |
| | | WVRQAPGQGLEWMGRIFPGSGNVKYNEKFKGRVTI |
| | | TADTSTSTAYMELSSLRSEDTAVYYCAGSYYSYDVL |
| | | DYWGQGTTVTVSS |

A-H.19

| | | |
|---|---|---|
| SEQ ID NO: 128 | VH + VL | QVQLVQSGAEVKKPGSSVKVSCKASGGTFRLTYIHW |
| | | VRQAPGQGLEWMGRISAGSGNVKYNEKFKGRVTIT |
| | | ADTSTSTAYMELSSLRSEDTAVYYCAGSYYSYDVLD |
| | | YWGQGTTVTVSSGGGGSGGGGSGGGGSGGGGSDIQ |
| | | MTQSPSFLSASVGDRVTITCKASQNVGDRVAWYQQ |
| | | KPGKAPKALIYSSSHRYKGVPSRFSGSGSGTEFTLTIS |
| | | SLQPEDFATYFCQQFKSYPLTFGQGTKLEIK |
| SEQ ID NO: 129 | VL | DIQMTQSPSFLSASVGDRVTITCKASQNVGDRVAWY |
| | | QQKPGKAPKALIYSSSHRYKGVPSRFSGSGSGTEFTL |
| | | TISSLQPEDFATYFCQQFKSYPLTFGQGTKLEIK |
| SEQ ID NO: 130 | VH | QVQLVQSGAEVKKPGSSVKVSCKASGGTFRLTYIHW |
| | | VRQAPGQGLEWMGRISAGSGNVKYNEKFKGRVTIT |
| | | ADTSTSTAYMELSSLRSEDTAVYYCAGSYYSYDVLD |
| | | YWGQGTTVTVSS |

A-H.20

| | | |
|---|---|---|
| SEQ ID NO: 131 | VH + VL | QVQLVQSGAEVKKPGSSVKVSCKASGGTFDKTYIH |
| | | WVRQAPGQGLEWMGRISAGSGNTKYNEKFKGRVTI |
| | | TADTSTSTAYMELSSLRSEDTAVYYCAGSYYSYDVL |
| | | DYWGQGTTVTVSSGGGGSGGGGSGGGGSGGGGSDI |
| | | QMTQSPSFLSASVGDRVTITCKASQNVDDRVAWYQ |
| | | QKPGKAPKALIYSSSHRYKGVPSRFSGSGSGTEFTLTI |
| | | SSLQPEDFATYFCQQFKSYPLTFGQGTKLEIK |
| SEQ ID NO: 132 | VL | DIQMTQSPSFLSASVGDRVTITCKASQNVDDRVAWY |
| | | QQKPGKAPKALIYSSSHRYKGVPSRFSGSGSGTEFTL |
| | | TISSLQPEDFATYFCQQFKSYPLTFGQGTKLEIK |
| SEQ ID NO: 133 | VH | QVQLVQSGAEVKKPGSSVKVSCKASGGTFDKTYIH |
| | | WVRQAPGQGLEWMGRISAGSGNTKYNEKFKGRVTI |
| | | TADTSTSTAYMELSSLRSEDTAVYYCAGSYYSYDVL |
| | | DYWGQGTTVTVSS |

A-H.21

| | | |
|---|---|---|
| SEQ ID NO: 134 | VH + VL | QVQLVQSGAEVKKPGSSVKVSCKASGHDFDKFYIH |
| | | WVRQAPGQGLEWMGRISAGSGNTKYNEKFKGRVTI |
| | | TADTSTSTAYMELSSLRSEDTAVYYCAGSYYSYDVL |
| | | DYWGQGTTVTVSSGGGGSGGGGSGGGGSGGGGSDI |
| | | QMTQSPSFLSASVGDRVTITCKASQNVDDRVAWYQ |
| | | QKPGKAPKALIYSSSHRYKGVPSRFSGSGSGTEFTLTI |
| | | SSLQPEDFATYFCQQFKSYPLTFGQGTKLEIK |
| SEQ ID NO: 135 | VL | DIQMTQSPSFLSASVGDRVTITCKASQNVDDRVAWY |
| | | QQKPGKAPKALIYSSSHRYKGVPSRFSGSGSGTEFTL |
| | | TISSLQPEDFATYFCQQFKSYPLTFGQGTKLEIK |
| SEQ ID NO: 136 | VH | QVQLVQSGAEVKKPGSSVKVSCKASGHDFDKFYIH |
| | | WVRQAPGQGLEWMGRISAGSGNTKYNEKFKGRVTI |
| | | TADTSTSTAYMELSSLRSEDTAVYYCAGSYYSYDVL |
| | | DYWGQGTTVTVSS |

A-H.22

| | | |
|---|---|---|
| SEQ ID NO: 137 | VH + VL | QVQLVQSGAEVKKPGSSVKVSCKASGTDFKLTYIH |
| | | WVRQAPGQGLEWMGRISAGSGNVKYNEKFKGRVTI |
| | | TADTSTSTAYMELSSLRSEDTAVYYCAGSYYSYDVL |
| | | DYWGQGTTVTVSSGGGGSGGGGSGGGGSGGGGSDI |
| | | QMTQSPSFLSASVGDRVTITCKASQNVDNKVAWHQ |
| | | QKPGKAPKALIYSSSHRYKGVPSRFSGSGSGTEFTLTI |
| | | SSLQPEDFATYFCQQFKSYPLTFGQGTKLEIK |
| SEQ ID NO: 138 | VL | DIQMTQSPSFLSASVGDRVTITCKASQNVDNKVAWH |
| | | QQKPGKAPKALIYSSSHRYKGVPSRFSGSGSGTEFTL |
| | | TISSLQPEDFATYFCQQFKSYPLTFGQGTKLEIK |
| SEQ ID NO: 139 | VH | QVQLVQSGAEVKKPGSSVKVSCKASGTDFKLTYIH |
| | | WVRQAPGQGLEWMGRISAGSGNVKYNEKFKGRVTI |
| | | TADTSTSTAYMELSSLRSEDTAVYYCAGSYYSYDVL |
| | | DYWGQGTTVTVSS |

A-H.23

| | | |
|---|---|---|
| SEQ ID NO: 140 | VH + VL | QVQLVQSGAEVKKPGSSVKVSCKASGHDFRLTYIH |
| | | WVRQAPGQGLEWMGRISAGSGNVKYNEKFKGRVTI |
| | | TADTSTSTAYMELSSLRSEDTAVYYCAGSYYSYDVL |
| | | DYWGQGTTVTVSSGGGGSGGGGSGGGGSGGGGSDI |
| | | QMTQSPSFLSASVGDRVTITCKASQNVADRVAWYQ |
| | | QKPGKAPKALIYSSSHRYKGVPSRFSGSGSGTEFTLTI |
| | | SSLQPEDFATYFCQQFKSYPLTFGQGTKLEIK |
| SEQ ID NO: 141 | VL | DIQMTQSPSFLSASVGDRVTITCKASQNVADRVAWY |
| | | QQKPGKAPKALIYSSSHRYKGVPSRFSGSGSGTEFTL |
| | | TISSLQPEDFATYFCQQFKSYPLTFGQGTKLEIK |
| SEQ ID NO: 142 | VH | QVQLVQSGAEVKKPGSSVKVSCKASGHDFRLTYIH |
| | | WVRQAPGQGLEWMGRISAGSGNVKYNEKFKGRVTI |
| | | TADTSTSTAYMELSSLRSEDTAVYYCAGSYYSYDVL |
| | | DYWGQGTTVTVSS |

A-H.24

| | | |
|---|---|---|
| SEQ ID NO: 143 | VH + VL | QVQLVQSGAEVKKPGSSVKVSCKASGHDFHLWYIH |
| | | WVRQAPGQGLEWMGRVSAGSGNVKYNEKFKGRVT |
| | | ITADTSTSTAYMELSSLRSEDTAVYYCAGSYYSYDV |
| | | LDYWGQGTTVTVSSGGGGSGGGGSGGGGSGGGGS |
| | | DIQMTQSPSFLSASVGDRVTITCKASQNVDNKVAWH |
| | | QQKPGKAPKALIYSSSHRYKGVPSRFSGSGSGTEFTL |
| | | TISSLQPEDFATYFCQQFKSYPLTFGQGTKLEIK |
| SEQ ID NO: 144 | VL | DIQMTQSPSFLSASVGDRVTITCKASQNVDNKVAWH |
| | | QQKPGKAPKALIYSSSHRYKGVPSRFSGSGSGTEFTL |
| | | TISSLQPEDFATYFCQQFKSYPLTFGQGTKLEIK |
| SEQ ID NO: 145 | VH | QVQLVQSGAEVKKPGSSVKVSCKASGHDFHLWYIH |
| | | WVRQAPGQGLEWMGRVSAGSGNVKYNEKFKGRVT |
| | | ITADTSTSTAYMELSSLRSEDTAVYYCAGSYYSYDV |
| | | LDYWGQGTTVTVSS |

A-H.25

| | | |
|---|---|---|
| SEQ ID NO: 146 | VH + VL | QVQLVQSGAEVKKPGSSVKVSCKASGHDFHLWYIH |
| | | WVRQAPGQGLEWMGRVFAGSGNTKYNEKFKGRVT |
| | | ITADTSTSTAYMELSSLRSEDTAVYYCAGSYYSYDV |
| | | LDYWGQGTTVTVSSGGGGSGGGGSGGGGSGGGGS |
| | | DIQMTQSPSFLSASVGDRVTITCKASQNVEDKVAWY |
| | | QQKPGKAPKALIYSSSHRYKGVPSRFSGSGSGTEFTL |
| | | TISSLQPEDFATYFCQQFKSYPLTFGQGTKLEIK |
| SEQ ID NO: 147 | VL | DIQMTQSPSFLSASVGDRVTITCKASQNVEDKVAWY |
| | | QQKPGKAPKALIYSSSHRYKGVPSRFSGSGSGTEFTL |
| | | TISSLQPEDFATYFCQQFKSYPLTFGQGTKLEIK |
| SEQ ID NO: 148 | VH | QVQLVQSGAEVKKPGSSVKVSCKASGHDFHLWYIH |
| | | WVRQAPGQGLEWMGRVFAGSGNTKYNEKFKGRVT |
| | | ITADTSTSTAYMELSSLRSEDTAVYYCAGSYYSYDV |
| | | LDYWGQGTTVTVSs |

A-H.26

| | | |
|---|---|---|
| SEQ ID NO: 149 | VH + VL | QVQLVQSGAEVKKPGSSVKVSCKASGTDFKLTYIH |
| | | WVRQAPGQGLEWMGRIFPGSGNTKYNEKFKGRVTI |
| | | TADTSTSTAYMELSSLRSEDTAVYYCAGSYYSYDVL |
| | | DYWGQGTTVTVSSGGGGSGGGGSGGGGSGGGGSDI |
| | | QMTQSPSFLSASVGDRVTITCKASQNVDDRVAWYQ |
| | | QKPGKAPKALIYSSSHRYKGVPSRFSGSGSGTEFTLTI |
| | | SSLQPEDFATYFCQQFKSYPLTFGQGTKLEIK |
| SEQ ID NO: 150 | VL | DIQMTQSPSFLSASVGDRVTITCKASQNVDDRVAWY |
| | | QQKPGKAPKALIYSSSHRYKGVPSRFSGSGSGTEFTL |
| | | TISSLQPEDFATYFCQQFKSYPLTFGQGTKLEIK |
| SEQ ID NO: 151 | VH | QVQLVQSGAEVKKPGSSVKVSCKASGTDFKLTYIH |
| | | WVRQAPGQGLEWMGRIFPGSGNTKYNEKFKGRVTI |
| | | TADTSTSTAYMELSSLRSEDTAVYYCAGSYYSYDVL |
| | | DYWGQGTTVTVSS |

A-H.27

| | | |
|---|---|---|
| SEQ ID NO: 153 | VH + VL | QVQLVQSGAEVKKPGSSVKVSCKASGTDFKLTYIH |
| | | WVRQAPGQGLEWMGRVSAGSGNVKYNEKFKGRVT |
| | | ITADTSTSTAYMELSSLRSEDTAVYYCAGSYYSYDV |
| | | LDYWGQGTTVTVSSGGGGSGGGGSGGGGSGGGGS |
| | | DIQMTQSPSFLSASVGDRVTITCKASQNVGNRVAWY |
| | | QQKPGKAPKALIYSSSHRYKGVPSRFSGSGSGTEFTL |
| | | TISSLQPEDFATYFCQQFKSYPLTFGQGTKLEIK |
| SEQ ID NO: 154 | VL | DIQMTQSPSFLSASVGDRVTITCKASQNVGNRVAWY |
| | | QQKPGKAPKALIYSSSHRYKGVPSRFSGSGSGTEFTL |
| | | TISSLQPEDFATYFCQQFKSYPLTFGQGTKLEIK |
| SEQ ID NO: 155 | VH | QVQLVQSGAEVKKPGSSVKVSCKASGTDFKLTYIH |
| | | WVRQAPGQGLEWMGRVSAGSGNVKYNEKFKGRVT |
| | | ITADTSTSTAYMELSSLRSEDTAVYYCAGSYYSYDV |
| | | LDYWGQGTTVTVSS |

A-H.28

| | | |
|---|---|---|
| SEQ ID NO: 156 | VH + VL | QVQLVQSGAEVKKPGSSVKVSCKASGTDFKLTYIH |
| | | WVRQAPGQGLEWMGRISPGSGNTKYNEKFKGRVTI |
| | | TADTSTSTAYMELSSLRSEDTAVYYCAGSYYSYDVL |
| | | DYWGQGTTVTVSSGGGGSGGGGSGGGGSGGGGSDI |
| | | QMTQSPSFLSASVGDRVTITCKASQNVGDRVAWYQ |
| | | QKPGKAPKALIYSSSHRYKGVPSRFSGSGSGTEFTLTI |
| | | SSLQPEDFATYFCQQFKSYPLTFGQGTKLEIK |
| SEQ ID NO: 157 | VL | DIQMTQSPSFLSASVGDRVTITCKASQNVGDRVAWY |
| | | QQKPGKAPKALIYSSSHRYKGVPSRFSGSGSGTEFTL |
| | | TISSLQPEDFATYFCQQFKSYPLTFGQGTKLEIK |
| SEQ ID NO: 158 | VH | QVQLVQSGAEVKKPGSSVKVSCKASGTDFKLTYIH |
| | | WVRQAPGQGLEWMGRISPGSGNTKYNEKFKGRVTI |
| | | TADTSTSTAYMELSSLRSEDTAVYYCAGSYYSYDVL |
| | | DYWGQGTTVTVSS |

A-H.29

| | | |
|---|---|---|
| SEQ ID NO: 159 | VH + VL | QVQLVQSGAEVKKPGSSVKVSCKASGHDFHLWYIH |
| | | WVRQAPGQGLEWMGRISPGSGNVKYNEKFKGRVTI |
| | | TADTSTSTAYMELSSLRSEDTAVYYCAGSYYSYDVL |
| | | DYWGQGTTVTVSSGGGGSGGGGSGGGGSGGGGSDI |
| | | QMTQSPSFLSASVGDRVTITCKASQNVGDRVAWHQ |
| | | QKPGKAPKALIYSSSHRYKGVPSRFSGSGSGTEFTLTI |
| | | SSLQPEDFATYFCQQFKSYPLTFGQGTKLEIK |
| SEQ ID NO: 160 | VL | DIQMTQSPSFLSASVGDRVTITCKASQNVGDRVAWH |
| | | QQKPGKAPKALIYSSSHRYKGVPSRFSGSGSGTEFTL |
| | | TISSLQPEDFATYFCQQFKSYPLTFGQGTKLEIK |
| SEQ ID NO: 161 | VH | QVQLVQSGAEVKKPGSSVKVSCKASGHDFHLWYIH |
| | | WVRQAPGQGLEWMGRISPGSGNVKYNEKFKGRVTI |
| | | TADTSTSTAYMELSSLRSEDTAVYYCAGSYYSYDVL |
| | | DYWGQGTTVTVSS |

A-H.31

| | | |
|---|---|---|
| SEQ ID NO: 162 | VH + VL | QVQLVQSGAEVKKPGSSVKVSCKASGHDFKLTYIH |
| | | WVRQAPGQGLEWMGRISAGSGNVKYNEKFKGRVTI |
| | | TADTSTSTAYMELSSLRSEDTAVYYCAGSYYSYDVL |
| | | DYWGQGTTVTVSSGGGGSGGGGSGGGGSGGGGSDI |
| | | QMTQSPSFLSASVGDRVTITCKASQNVDDRVAWYQ |
| | | QKPGKAPKALIYSSSHRYKGVPSRFSGSGSGTEFTLTI |
| | | SSLQPEDFATYFCQQFKSYPLTFGQGTKLEIK |
| SEQ ID NO: 163 | VL | DIQMTQSPSFLSASVGDRVTITCKASQNVDDRVAWY |
| | | QQKPGKAPKALIYSSSHRYKGVPSRFSGSGSGTEFTL |
| | | TISSLQPEDFATYFCQQFKSYPLTFGQGTKLEIK |
| SEQ ID NO: 164 | VH | QVQLVQSGAEVKKPGSSVKVSCKASGHDFKLTYIH |
| | | WVRQAPGQGLEWMGRISAGSGNVKYNEKFKGRVTI |
| | | TADTSTSTAYMELSSLRSEDTAVYYCAGSYYSYDVL |
| | | DYWGQGTTVTVSS |

A-H.31

| | | |
|---|---|---|
| SEQ ID NO: 165 | VH + VL | QVQLVQSGAEVKKPGSSVKVSCKASGTDFHLWYIH |
| | | WVRQAPGQGLEWMGRVFAGSGSYRYNEKFKGRVTI |
| | | TADTSTSTAYMELSSLRSEDTAVYYCAGSYYSYDVL |
| | | DYWGQGTTVTVSSGGGGSGGGGSGGGGSGGGGSDI |
| | | QMTQSPSFLSASVGDRVTITCKASQNVDDRVAWYQ |
| | | QKPGKAPKALIYSSSHRYKGVPSRFSGSGSGTEFTLTI |
| | | SSLQPEDFATYFCQQFKSYPLTFGQGTKLEIK |
| SEQ ID NO: 166 | VL | DIQMTQSPSFLSASVGDRVTITCKASQNVDDRVAWY |
| | | QQKPGKAPKALIYSSSHRYKGVPSRFSGSGSGTEFTL |
| | | TISSLQPEDFATYFCQQFKSYPLTFGQGTKLEIK |
| SEQ ID NO: 167 | VH | QVQLVQSGAEVKKPGSSVKVSCKASGTDFHLWYIH |
| | | WVRQAPGQGLEWMGRVFAGSGSYRYNEKFKGRVTI |
| | | TADTSTSTAYMELSSLRSEDTAVYYCAGSYYSYDVL |
| | | DYWGQGTTVTVSS |

A-H.32

| | | |
|---|---|---|
| SEQ ID NO: 168 | VH + VL | QVQLVQSGAEVKKPGSSVKVSCKASGTDFDKIYIHW |
| | | VRQAPGQGLEWMGRISAGSGNTKYNEKFKGRVTIT |
| | | ADTSTSTAYMELSSLRSEDTAVYYCAGSYYSYDVLD |
| | | YWGQGTTVTVSSGGGGSGGGGSGGGGSGGGGSDIQ |
| | | MTQSPSFLSASVGDRVTITCKASQNVADRVAWYQQ |
| | | KPGKAPKALIYSSSHRYKGVPSRFSGSGSGTEFTLTIS |
| | | SLQPEDFATYFCQQFKSYPLTFGQGTKLEIK |
| SEQ ID NO: 169 | VL | DIQMTQSPSFLSASVGDRVTITCKASQNVADRVAWY |
| | | QQKPGKAPKALIYSSSHRYKGVPSRFSGSGSGTEFTL |
| | | TISSLQPEDFATYFCQQFKSYPLTFGQGTKLEIK |
| SEQ ID NO: 170 | VH | QVQLVQSGAEVKKPGSSVKVSCKASGTDFDKIYIHW |
| | | VRQAPGQGLEWMGRISAGSGNTKYNEKFKGRVTIT |
| | | ADTSTSTAYMELSSLRSEDTAVYYCAGSYYSYDVLD |
| | | YWGQGTTVTVSS |

A-H.33

| | | |
|---|---|---|
| SEQ ID NO: 171 | VH + VL | QVQLVQSGAEVKKPGSSVKVSCKASGTDFKLTYIH |
| | | WVRQAPGQGLEWMGRISAGSGNTKYNEKFKGRVTI |
| | | TADTSTSTAYMELSSLRSEDTAVYYCAGSYYSYDVL |
| | | DYWGQGTTVTVSSGGGGSGGGGSGGGGSGGGGSDI |
| | | QMTQSPSFLSASVGDRVTITCKASQNVEDRVAWYQ |
| | | QKPGKAPKALIYSSSHRYKGVPSRFSGSGSGTEFTLTI |
| | | SSLQPEDFATYFCQQFKSYPLTFGQGTKLEIK |
| SEQ ID NO: 172 | VL | DIQMTQSPSFLSASVGDRVTITCKASQNVEDRVAWY |
| | | QQKPGKAPKALIYSSSHRYKGVPSRFSGSGSGTEFTL |
| | | TISSLQPEDFATYFCQQFKSYPLTFGQGTKLEIK |
| SEQ ID NO: 173 | VH | QVQLVQSGAEVKKPGSSVKVSCKASGTDFKLTYIH |
| | | WVRQAPGQGLEWMGRISAGSGNTKYNEKFKGRVTI |
| | | TADTSTSTAYMELSSLRSEDTAVYYCAGSYYSYDVL |
| | | DYWGQGTTVTVSS |

A-H.34

| | | |
|---|---|---|
| SEQ ID NO: 174 | VH + VL | QVQLVQSGAEVKKPGSSVKVSCKASGTDFRLTYIHW |
| | | VRQAPGQGLEWMGRISPGSGNTKYNEKFKGRVTITA |
| | | DTSTSTAYMELSSLRSEDTAVYYCAGSYYSYDVLDY |
| | | WGQGTTVTVSSGGGGSGGGGSGGGGSGGGGSDIQM |
| | | TQSPSFLSASVGDRVTITCKASQNVGNRVAWYQQKP |
| | | GKAPKALIYSSSHRYKGVPSRFSGSGSGTEFTLTISSL |
| | | QPEDFATYFCQQFKSYPLTFGQGTKLEIK |
| SEQ ID NO: 175 | VL | DIQMTQSPSFLSASVGDRVTITCKASQNVGNRVAWY |
| | | QQKPGKAPKALIYSSSHRYKGVPSRFSGSGSGTEFTL |
| | | TISSLQPEDFATYFCQQFKSYPLTFGQGTKLEIK |
| SEQ ID NO: 176 | VH | QVQLVQSGAEVKKPGSSVKVSCKASGTDFRLTYIHW |
| | | VRQAPGQGLEWMGRISPGSGNTKYNEKFKGRVTITA |
| | | DTSTSTAYMELSSLRSEDTAVYYCAGSYYSYDVLDY |
| | | WGQGTTVTVSS |

A-H.35

| | | |
|---|---|---|
| SEQ ID NO: 177 | VH + VL | QVQLVQSGAEVKKPGSSVKVSCKASGHDFDKTYIH |
| | | WVRQAPGQGLEWMGRVSAGSGNVKYNEKFKGRVT |
| | | ITADTSTSTAYMELSSLRSEDTAVYYCAGSYYSYDV |
| | | LDYWGQGTTVTVSSGGGGSGGGGSGGGGSGGGGS |
| | | DIQMTQSPSFLSASVGDRVTITCKASQNVEDRVAWY |
| | | QQKPGKAPKALIYSSSHRYKGVPSRFSGSGSGTEFTL |
| | | TISSLQPEDFATYFCQQFKSYPLTFGQGTKLEIK |
| SEQ ID NO: 178 | VL | DIQMTQSPSFLSASVGDRVTITCKASQNVEDRVAWY |
| | | QQKPGKAPKALIYSSSHRYKGVPSRFSGSGSGTEFTL |
| | | TISSLQPEDFATYFCQQFKSYPLTFGQGTKLEIK |
| SEQ ID NO: 179 | VH | QVQLVQSGAEVKKPGSSVKVSCKASGHDFDKTYIH |
| | | WVRQAPGQGLEWMGRVSAGSGNVKYNEKFKGRVT |
| | | ITADTSTSTAYMELSSLRSEDTAVYYCAGSYYSYDV |
| | | LDYWGQGTTVTVSs |

A-H.36

| | | |
|---|---|---|
| SEQ ID NO: 180 | VH + VL | QVQLVQSGAEVKKPGSSVKVSCKASGHDFKLTYIH |
| | | WVRQAPGQGLEWMGRVSPGSGNTKYNEKFKGRVTI |
| | | TADTSTSTAYMELSSLRSEDTAVYYCAGSYYSYDVL |
| | | DYWGQGTTVTVSSGGGGSGGGGSGGGGSGGGGSDI |
| | | QMTQSPSFLSASVGDRVTITCKASQNVEDRVAWHQ |
| | | QKPGKAPKALIYSSSHRYKGVPSRFSGSGSGTEFTLTI |
| | | SSLQPEDFATYFCQQFKSYPLTFGQGTKLEIK |
| SEQ ID NO: 181 | VL | DIQMTQSPSFLSASVGDRVTITCKASQNVEDRVAWH |
| | | QQKPGKAPKALIYSSSHRYKGVPSRFSGSGSGTEFTL |
| | | TISSLQPEDFATYFCQQFKSYPLTFGQGTKLEIK |
| SEQ ID NO: 182 | VH | QVQLVQSGAEVKKPGSSVKVSCKASGHDFKLTYIH |
| | | WVRQAPGQGLEWMGRVSPGSGNTKYNEKFKGRVTI |
| | | TADTSTSTAYMELSSLRSEDTAVYYCAGSYYSYDVL |
| | | DYWGQGTTVTVSS |

A-H.37

| | | |
|---|---|---|
| SEQ ID NO: 183 | VH + VL | QVQLVQSGAEVKKPGSSVKVSCKASGHDFDKTYIH |
| | | WVRQAPGQGLEWMGRIYPGSGNVKYNEKFKGRVTI |
| | | TADTSTSTAYMELSSLRSEDTAVYYCAGSYYSYDVL |
| | | DYWGQGTTVTVSSGGGGSGGGGSGGGGSGGGGSDI |
| | | QMTQSPSFLSASVGDRVTITCKASQNVADRVAWYQ |
| | | QKPGKAPKALIYSSSHRYKGVPSRFSGSGSGTEFTLTI |
| | | SSLQPEDFATYFCQQFKSYPLTFGQGTKLEIK |
| SEQ ID NO: 184 | VL | DIQMTQSPSFLSASVGDRVTITCKASQNVADRVAWY |
| | | QQKPGKAPKALIYSSSHRYKGVPSRFSGSGSGTEFTL |
| | | TISSLQPEDFATYFCQQFKSYPLTFGQGTKLEIK |
| SEQ ID NO: 185 | VH | QVQLVQSGAEVKKPGSSVKVSCKASGHDFDKTYIH |
| | | WVRQAPGQGLEWMGRIYPGSGNVKYNEKFKGRVTI |
| | | TADTSTSTAYMELSSLRSEDTAVYYCAGSYYSYDVL |
| | | DYWGQGTTVTVSS |

A-H.38

| | | |
|---|---|---|
| SEQ ID NO: 186 | VH + VL | QVQLVQSGAEVKKPGSSVKVSCKASGTDFDKTYIH |
| | | WVRQAPGQGLEWMGRISAGSGNVKYNEKFKGRVTI |
| | | TADTSTSTAYMELSSLRSEDTAVYYCAGSYYSYDVL |
| | | DYWGQGTTVTVSSGGGGSGGGGSGGGGSGGGGSDI |
| | | QMTQSPSFLSASVGDRVTITCKASQNVDDRVAWYQ |
| | | QKPGKAPKALIYSSSHRYKGVPSRFSGSGSGTEFTLTI |
| | | SSLQPEDFATYFCQQFKSYPLTFGQGTKLEIK |
| SEQ ID NO: 187 | VL | DIQMTQSPSFLSASVGDRVTITCKASQNVDDRVAWY |
| | | QQKPGKAPKALIYSSSHRYKGVPSRFSGSGSGTEFTL |
| | | TISSLQPEDFATYFCQQFKSYPLTFGQGTKLEIK |
| SEQ ID NO: 188 | VH | QVQLVQSGAEVKKPGSSVKVSCKASGTDFDKTYIH |
| | | WVRQAPGQGLEWMGRISAGSGNVKYNEKFKGRVTI |
| | | TADTSTSTAYMELSSLRSEDTAVYYCAGSYYSYDVL |
| | | DYWGQGTTVTVSS |

A-H.39

| | | |
|---|---|---|
| SEQ ID NO: 189 | VH + VL | QVQLVQSGAEVKKPGSSVKVSCKASGTDFDKIYIHW |
| | | VRQAPGQGLEWMGRISAGSGNIKYNEKFKGRVTITA |
| | | DTSTSTAYMELSSLRSEDTAVYYCAGSYYSYDVLDY |
| | | WGQGTTVTVSSGGGGSGGGGSGGGGSGGGGSDIQM |
| | | TQSPSFLSASVGDRVTITCKASQNVDDRVAWYQQKP |
| | | GKAPKALIYSSSHRYKGVPSRFSGSGSGTEFTLTISSL |
| | | QPEDFATYFCQQFKSYPLTFGQGTKLEIK |
| SEQ ID NO: 190 | VL | DIQMTQSPSFLSASVGDRVTITCKASQNVDDRVAWY |
| | | QQKPGKAPKALIYSSSHRYKGVPSRFSGSGSGTEFTL |
| | | TISSLQPEDFATYFCQQFKSYPLTFGQGTKLEIK |
| SEQ ID NO: 191 | VH | QVQLVQSGAEVKKPGSSVKVSCKASGTDFDKIYIHW |
| | | VRQAPGQGLEWMGRISAGSGNIKYNEKFKGRVTITA |
| | | DTSTSTAYMELSSLRSEDTAVYYCAGSYYSYDVLDY |
| | | WGQGTTVTVSS |

A-H.40

| | | |
|---|---|---|
| SEQ ID NO: 192 | VH + VL | QVQLVQSGAEVKKPGSSVKVSCKASGTDFDKIYIHW |
| | | VRQAPGQGLEWMGRISAGSGNVKYNEKFKGRVTIT |
| | | ADTSTSTAYMELSSLRSEDTAVYYCAGSYYSYDVLD |
| | | YWGQGTTVTVSSGGGGSGGGGSGGGGSGGGGSDIQ |
| | | MTQSPSFLSASVGDRVTITCKASQNVGDRVAWYQQ |
| | | KPGKAPKALIYSSSHRYKGVPSRFSGSGSGTEFTLTIS |
| | | SLQPEDFATYFCQQFKSYPLTFGQGTKLEIK |
| SEQ ID NO: 193 | VL | DIQMTQSPSFLSASVGDRVTITCKASQNVGDRVAWY |
| | | QQKPGKAPKALIYSSSHRYKGVPSRFSGSGSGTEFTL |
| | | TISSLQPEDFATYFCQQFKSYPLTFGQGTKLEIK |
| SEQ ID NO: 194 | VH | QVQLVQSGAEVKKPGSSVKVSCKASGTDFDKIYIHW |
| | | VRQAPGQGLEWMGRISAGSGNVKYNEKFKGRVTIT |
| | | ADTSTSTAYMELSSLRSEDTAVYYCAGSYYSYDVLD |
| | | YWGQGTTVTVSS |

A-H.41

| | | |
|---|---|---|
| SEQ ID NO: 195 | VH + VL | QVQLVQSGAEVKKPGSSVKVSCKASGGTFKLTYIH |
| | | WVRQAPGQGLEWMGRVSAGSGNVKYNEKFKGRVT |
| | | ITADTSTSTAYMELSSLRSEDTAVYYCAGSYYSYDV |
| | | LDYWGQGTTVTVSSGGGGSGGGGSGGGGSGGGGS |
| | | DIQMTQSPSFLSASVGDRVTITCKASQNVDDRVAWY |
| | | QQKPGKAPKALIYSSSHRYKGVPSRFSGSGSGTEFTL |
| | | TISSLQPEDFATYFCQQFKSYPLTFGQGTKLEIK |
| SEQ ID NO: 196 | VL | DIQMTQSPSFLSASVGDRVTITCKASQNVDDRVAWY |
| | | QQKPGKAPKALIYSSSHRYKGVPSRFSGSGSGTEFTL |
| | | TISSLQPEDFATYFCQQFKSYPLTFGQGTKLEIK |
| SEQ ID NO: 197 | VH | QVQLVQSGAEVKKPGSSVKVSCKASGGTFKLTYIH |
| | | WVRQAPGQGLEWMGRVSAGSGNVKYNEKFKGRVT |
| | | ITADTSTSTAYMELSSLRSEDTAVYYCAGSYYSYDV |
| | | LDYWGQGTTVTVSs |

A-H.42

| | | |
|---|---|---|
| SEQ ID NO: 198 | VH + VL | QVQLVQSGAEVKKPGSSVKVSCKASGTDFKLTYIH |
| | | WVRQAPGQGLEWMGRISPGSGNVKYNEKFKGRVTI |
| | | TADTSTSTAYMELSSLRSEDTAVYYCAGSYYSYDVL |
| | | DYWGQGTTVTVSSGGGGSGGGGSGGGGSGGGGSDI |
| | | QMTQSPSFLSASVGDRVTITCKASQNVDNRVAWHQ |
| | | QKPGKAPKALIYSSSHRYKGVPSRFSGSGSGTEFTLTI |
| | | SSLQPEDFATYFCQQFKSYPLTFGQGTKLEIK |
| SEQ ID NO: 199 | VL | DIQMTQSPSFLSASVGDRVTITCKASQNVDNRVAWH |
| | | QQKPGKAPKALIYSSSHRYKGVPSRFSGSGSGTEFTL |
| | | TISSLQPEDFATYFCQQFKSYPLTFGQGTKLEIK |
| SEQ ID NO: 200 | VH | QVQLVQSGAEVKKPGSSVKVSCKASGTDFKLTYIH |
| | | WVRQAPGQGLEWMGRISPGSGNVKYNEKFKGRVTI |
| | | TADTSTSTAYMELSSLRSEDTAVYYCAGSYYSYDVL |
| | | DYWGQGTTVTVSS |

A-H.43

| | | |
|---|---|---|
| SEQ ID NO: 201 | VH + VL | QVQLVQSGAEVKKPGSSVKVSCKASGHDFDKFYIH |
| | | WVRQAPGQGLEWMGRVSAGSGNTKYNEKFKGRVT |
| | | ITADTSTSTAYMELSSLRSEDTAVYYCAGSYYSYDV |
| | | LDYWGQGTTVTVSSGGGGSGGGGSGGGGSGGGGS |
| | | DIQMTQSPSFLSASVGDRVTITCKASQNVDNRVAWY |
| | | QQKPGKAPKALIYSSSHRYKGVPSRFSGSGSGTEFTL |
| | | TISSLQPEDFATYFCQQFKSYPLTFGQGTKLEIK |
| SEQ ID NO: 202 | VL | DIQMTQSPSFLSASVGDRVTITCKASQNVDNRVAWY |
| | | QQKPGKAPKALIYSSSHRYKGVPSRFSGSGSGTEFTL |
| | | TISSLQPEDFATYFCQQFKSYPLTFGQGTKLEIK |
| SEQ ID NO: 203 | VH | QVQLVQSGAEVKKPGSSVKVSCKASGHDFDKFYIH |
| | | WVRQAPGQGLEWMGRVSAGSGNTKYNEKFKGRVT |
| | | ITADTSTSTAYMELSSLRSEDTAVYYCAGSYYSYDV |
| | | LDYWGQGTTVTVSS |

A-H.44

| | | |
|---|---|---|
| SEQ ID NO: 204 | VH + VL | QVQLVQSGAEVKKPGSSVKVSCKASGTDFDKFYIH |
| | | WVRQAPGQGLEWMGRVSAGSGNVKYNEKFKGRVT |
| | | ITADTSTSTAYMELSSLRSEDTAVYYCAGSYYSYDV |
| | | LDYWGQGTTVTVSSGGGGSGGGGSGGGGSGGGGS |
| | | DIQMTQSPSFLSASVGDRVTITCKASQNVGDRVVWY |
| | | QQKPGKAPKALIYSSSHRYKGVPSRFSGSGSGTEFTL |
| | | TISSLQPEDFATYFCQQFKSYPLTFGQGTKLEIK |
| SEQ ID NO: 205 | VH | QVQLVQSGAEVKKPGSSVKVSCKASGTDFDKFYIH |
| | | WVRQAPGQGLEWMGRVSAGSGNVKYNEKFKGRVT |
| | | ITADTSTSTAYMELSSLRSEDTAVYYCAGSYYSYDV |
| | | LDYWGQGTTVTVSs |

A-H.45

| | | |
|---|---|---|
| SEQ ID NO: 206 | VH + VL | QVQLVQSGAEVKKPGSSVKVSCKASGYSFTTYYIHW |
| | | VRQAPGQGLEWMGWFSAGSGNTKYNEKFKGRVTIT |
| | | ADTSTSTAYMELSSLRSEDTAVYYCAVSYYSYDVLD |
| | | YWGQGTTVTVSSGGGGSGGGGSGGGGSGGGGSDIQ |
| | | MTQSPSFLSASVGDRVTITCKASQNVGINVVWHQQK |
| | | PGKAPKALIYSSSHRYSGVPSRFSGSGSGTEFTLTISSL |
| | | QPEDFATYFCQQFKSYPLTFGQGTKLEIK |
| SEQ ID NO: 207 | VH | QVQLVQSGAEVKKPGSSVKVSCKASGYSFTTYYIHW |
| | | VRQAPGQGLEWMGWFSAGSGNTKYNEKFKGRVTIT |
| | | ADTSTSTAYMELSSLRSEDTAVYYCAVSYYSYDVLD |
| | | YWGQGTTVTVSS |

A-H.46

| | | |
|---|---|---|
| SEQ ID NO: 208 | VH + VL | QVQLVQSGAEVKKPGSSVKVSCKASGYSFTTYYIHW |
| | | VRQAPGQGLEWMGWFSAGSGNTKYNEKFKGRVTIT |
| | | ADTSTSTAYMELSSLRSEDTAVYYCAGSYYSYDVLD |
| | | YWGQGITVTVSSGGGGSGGGGSGGGGSGGGGSDIQ |
| | | MTQSPSFLSASVGDRVTITCKASQNVGINVVWHQQK |
| | | PGKAPKALIYSSSHRYSGVPSRFSGSGSGTEFTLTISSL |
| | | QPEDFATYFCQQFKSYPLTFGQGTKLEIK |
| SEQ ID NO: 209 | VH | QVQLVQSGAEVKKPGSSVKVSCKASGYSFTTYYIHW |
| | | VRQAPGQGLEWMGWFSAGSGNTKYNEKFKGRVTIT |
| | | ADTSTSTAYMELSSLRSEDTAVYYCAGSYYSYDVLD |
| | | YWGQGTTVTVSS |

A-H.47

| | | |
|---|---|---|
| SEQ ID NO: 210 | VH + VL | QVQLVQSGAEVKKPGSSVKVSCKASGYSFTTYYIHW |
| | | VRQAPGQGLEWMGWFFPGSGNTKYNEKFKGRVTIT |
| | | ADTSTSTAYMELSSLRSEDTAVYYCAGSYYSYDVLD |
| | | YWGQGTIVTVSSGGGGSGGGGSGGGGSGGGGSDIQ |
| | | MTQSPSFLSASVGDRVT1TCKASQNVGINVVWHQQK |
| | | PGKAPKALIYSSSHRYSGVPSRFSGSGSGTEFTLT1SSL |
| | | QPEDFATYFCQQFKSYPLTFGQGTKLEIK |
| SEQ ID NO: 211 | VH | QVQLVQSGAEVKKPGSSVKVSCKASGYSFTTYYIHW |
| | | VRQAPGQGLEWMGWFFPGSGNTKYNEKFKGRVTIT |
| | | ADTSTSTAYMELSSLRSEDTAVYYCAGSYYSYDVLD |
| | | YWGQGTTVTVSS |

A-H.48

| | | |
|---|---|---|
| SEQ ID NO: 212 | VH + VL | QVQLVQSGAEVKKPGSSVKVSCKASGYSFTTYYIHW |
| | | VRQAPGQGLEWMGWFSPGSGNTKYNEKFKGRVTIT |
| | | ADTSTSTAYMELSSLRSEDTAVYYCAVSYYSYDVLD |
| | | YWGQGTTVTVSSGGGGSGGGGSGGGGSGGGGSDIQ |
| | | MTQSPSFLSASVGDRVTITCKASQNVGINVVWHQQK |
| | | PGKAPKALIYSSSHRYSGVPSRFSGSGSGTEFTLTI |
| | | SSLQPEDFATYFCQQFKSYPLTFGQGTKLEIK |
| SEQ ID NO: 213 | VH | QVQLVQSGAEVKKPGSSVKVSCKASGYSFTTYYIHW |
| | | VRQAPGQGLEWMGWFSPGSGNTKYNEKFKGRVTIT |
| | | ADTSTSTAYMELSSLRSEDTAVYYCAVSYYSYDVLD |
| | | YWGQGTTVTVSS |

A-H.49

| | | |
|---|---|---|
| SEQ ID NO: 214 | VH + VL | QVQLVQSGAEVKKPGSSVKVSCKASGYSFTTYYIHW |
| | | VRQAPGQGLEWMGWFSPGSGNTKYNEKFKGRVTIT |
| | | ADTSTSTAYMEISSIRSEDTAVYYQAGSYYSYDVLD |
| | | YWGQGTTVTVSSGGGGSGGGQSGGGGSGGGGSDIQ |
| | | MTQSPSFLSASVGDRVTITCKASQNVGINVVWHQQK |
| | | PGKAPKALIYSSSHRYSGVPSRFSGSGSGTEFTLTISSL |
| | | QPEDFATYFCQQFKSYPLTFGQGTKLEIK |
| SEQ ID NO: 215 | VH | QVQLVQSGAEVKKPGSSVKVSCKASGYSFTTYYIHW |
| | | VRQAPGQGLEWMGWFSPGSGNTKYNEKFKGRVTIT |
| | | ADTSTSTAYMELSSLRSEDTAVYYCAGSYYSYDVLD |
| | | YWGQGTTVTVSS |

A-H.50

| | | |
|---|---|---|
| SEQ ID NO: 216 | VH + VL | QVQLVQSGAEVKKPGSSVKVSCKASGYSFTTYYIHW |
| | | VRQAPGQGLEWMGRIFPGSGNIKYNEKFKGRVTITA |
| | | DTSTSTAYMELSSLRSEDTAVYYCAGSYYSYDVLDY |
| | | WGQGTTVTVSSGGGGSGGGGSGGGQSGGGGSDIQM |
| | | TQSPSFLSASVGDRVTITCKASQNVGINVVWHQQKP |
| | | GKAPKALIYSSSHRYSGVPSRFSGSGSGTEFTLTISSL |
| | | QPEDFATYFCQQFKSYPLTFGQGTKLEIK |
| SEQ ID NO: 217 | VH | QVQLVQSGAEVKKPGSSVKVSCKASGYSFTTYYIHW |
| | | VRQAPGQGLEWMGRIFPGSGNIKYNEKFKGRVTITA |
| | | DTSTSTAYMELSSLRSEDTAVYYCAGSYYSYDVLDY |
| | | WGQGTTVTVSS |

A-H.51

| | | |
|---|---|---|
| SEQ ID NO: 218 | VH + VL | QVQLVQSGAEVKKPGSSVKVSCKASGYSFTTYYIHW |
| | | VRQAPGQGLEWMGWFFPGSGNIKYNEKFKGRVTIT |
| | | ADTSTSTAYMELSSLRSEDTAVYYCAGSIYSAGVLD |
| | | YWGQGTTVTVSSGGGGSGGGGSGGGGSGGGGSDIQ |
| | | MTQSPSFLSASVGDRVTITCKASQNVGINVVWHQQK |
| | | PGKAPKALIYSSSHRYSGVPSRFSGSGSGTEFTLTISSL |
| | | QPEDFATYFCQQFKSYPLTFGQGTKLEIK |
| SEQ ID NO: 219 | VH | QVQLVQSGAEVKKPGSSVKVSCKASGYSFTTYYIHW |
| | | VRQAPGQGLEWMGWFFPGSGNIKYNEKFKGRVTIT |
| | | ADTSTSTAYMELSSLRSEDTAVYYCAGSIYSAGVLD |
| | | YWGQGTTVTVSS |

A-H.52

| | | |
|---|---|---|
| SEQ ID NO: 220 | VH + VL | QVQLVQSGAEVKKPGSSVKVSCKASGYSFTLGYIHW |
| | | VRQAPGQGLEWMGWFFPGSGNIKYNEKFKGRVTIT |
| | | ADTSTSTAYMELSSLRSEDTAVYYCAGSYYSYDVLD |
| | | YWGQGTTVTVSSGGGGSGGGGSGGGGSGGGGSDIQ |
| | | MTQSPSFLSASVGDRVTITCKASQNVGINVVWHQQK |
| | | PGKAPKALIYSSSHRYSGVPSRFSGSGSGTEFTLTI |
| | | SSLQPEDFATYFCQQFKSYPLTFGQGTKLEIK |
| SEQ ID NO: 221 | VH | QVQLVQSGAEVKKPGSSVKVSCKASGYSFTLGYIHW |
| | | VRQAPGQGLEWMGWFFPGSGNIKYNEKFKGRVTIT |
| | | ADTSTSTAYMELSSLRSEDTAVYYCAGSYYSYDVLD |
| | | YWGQGTTVTVSS |

A-H.53

| | | |
|---|---|---|
| SEQ ID NO: 222 | VH + VL | QVQLVQSGAEVKKPGSSVKVSCKASGYSFRLTYIHW |
| | | VRQAPGQGLEWMGWFFPGSGNIKYNEKFKGRVTIT |
| | | ADTSTSTAYMELSSLRSEDTAVYYCAGSYYSYDVLD |
| | | YWGQGTTVTVSSGGGGSGGGGSGGGGSGGGGSDIQ |
| | | MTQSPSFLSASVGDRVTITCKASQNVGINVVWHQQK |
| | | PGKAPKALIYSSSHRYSGVPSRFSGSGSGTEFTLTISSL |
| | | QPEDFATYFCQQFKSYPLTFGQGTKLEIK |
| SEQ ID NO: 223 | VH | QVQLVQSGAEVKKPGSSVKVSCKASGYSFRLTYIHW |
| | | VRQAPGQGLEWMGWFFPGSGNIKYNEKFKGRVTIT |
| | | ADTSTSTAYMELSSLRSEDTAVYYCAGSYYSYDVLD |
| | | YWGQGTTVTVSS |

A-H.54

| | | |
|---|---|---|
| SEQ ID NO: 224 | VH + VL | QVQLVQSGAEVKKPGSSVKVSCKASGYSFHNWYIH |
| | | WVRQAPGQGLEWMGWFFPGSGNIKYNEKFKGRVTI |
| | | TADTSTSTAYMELSSLRSEDTAVYYCAGSYYSYDVL |
| | | DYWGQGTTVTVSSGGGGSGGGGSGGGGSGGGGSDI |
| | | QMTQSPSFLSASVGDRVTITCKASQNVGINVVWHQQ |
| | | KPGKAPKALIYSSSHRYSGVPSRFSGSGSGTEFTLTIS |
| | | SLQPEDFATYFCQQFKSYPLTFGQGTKLEIK |
| SEQ ID NO: 225 | VH | QVQLVQSGAEVKKPGSSVKVSCKASGYSFHNWYIH |
| | | WVRQAPGQGLEWMGWFFPGSGNIKYNEKFKGRVTI |
| | | TADTSTSTAYMELSSLRSEDTAVYYCAGSYYSYDVL |
| | | DYWGQGTTVTVSS |

A-H.55 antibody

| | | |
|---|---|---|
| SEQ ID NO: 3 | HC CDR1 (Combined) | GYSFTTYYIH |
| SEQ ID NO: 4 | HC CDR2 (Combined) | WFFPGSGNIKYNEKFKG |
| SEQ ID NO: 5 | HC CDR3 (Combined) | SYYSYDVLDY |
| SEQ ID NO: 255 | HC CDR1 (Kabat) | TYYIH |
| SEQ ID NO: 46 | HC CDR2 (Kabat) | WFFPGSGNIKYNEKFKG |
| SEQ ID NO: 47 | HC CDR3 (Kabat) | SYYSYDVLDY |
| SEQ ID NO: 48 | HC CDR1 (Chothia) | GYSFTTY |
| SEQ ID NO: 49 | HC CDR2 (Chothia) | FPGSGN |
| SEQ ID NO: 50 | HC CDR3 (Chothia) | SYYSYDVLDY |
| SEQ ID NO: | VH | QVQLVQSGAEVKKPGSSVKVSCKASGYSFTTYYIHW |
| 1100 | | VRQAPGQGLEWMGWFFPGSGNIKYNEKFKGRVTIT |
| | | ADTSTSTAYMELSSLRSEDTAVYYCAGSYYSYDVLD |
| | | YWGQGTTVTVSS |
| SEQ ID NO: 6 | LC CDR1 (Combined) | KASQNVGINVV |
| SEQ ID NO: 7 | LC CDR2 (Combined) | SSSHRYS |
| SEQ ID NO: 8 | LC CDR3 (Combined) | QQFKSYPLT |
| SEQ ID NO: 51 | LC CDR1 (Kabat) | KASQNVGINVV |
| SEQ ID NO: 52 | LC CDR2 (Kabat) | SSSHRYS |
| SEQ ID NO: 53 | LC CDR3 (Kabat) | QQFKSYPLT |
| SEQ ID NO: 54 | LC CDR1 (Chothia) | KASQNVGINVV |
| SEQ ID NO: 55 | LC CDR2 (Chothia) | SSSHRYS |
| SEQ ID NO: 56 | LC CDR3 (Chothia) | QQFKSYPLT |
| SEQ ID NO: | VL | QSVLTQPPSVSEAPRQRVTISCKASQNVGINVVWHQ |
| 1101 | | QLPGKAPKALIYSSSHRYSGVSDRFSGSGSGTSFSLAI |
| | | SGLQSEDEADYFCQQFKSYPLTFGTGTKVTVL |

A-H.56

| | | |
|---|---|---|
| SEQ ID NO: | VH + VL (ScFv) | QVQLVQSGAEVKKPGSSVKVSCKASGHDFDKFYIH |
| 1309 | | WVRQAPGQGLEWMGRVSAGSGNVKYNEKFKGRVT |
| | | ITADTSTSTAYMELSSLRSEDTAVYYCAGSYYSYDV |
| | | LDYWGQGTTVTVSSGGGGSGGGGSGGGGSGGGGS |
| | | DIQMTQSPSFLSASVGDRVTITCKASQNVGNRVAWY |
| | | QQKPGKAPKALIYSSSHRYKGVPSRFSGSGSGTEFTL |
| | | TISSLQPEDFATYFCQQFKSYPLTFGQGTKLEIK |

A-H.57

| | | |
|---|---|---|
| SEQ ID NO: | VH + VL (ScFv) | QVQLVQSGAEVKKPGSSVKVSCKASGHDFRLTYIH |
| 1326 | | WVRQAPGQGLEWMGRVSAGSGNTKYNEKFKGRVT |
| | | ITADTSTSTAYMELSSLRSEDTAVYYCAVSYYSYDV |
| | | LDYWGQGTTVTVSSGGGGSGGGGSGGGGSGGGGS |
| | | DIQMTQSPSFLSASVGDRVTITCKASQNVGDRVVWH |
| | | QQKPGKAPKALIYSSSHRYKGVPSRFSGSGSGTEFTL |
| | | TISSLQPEDFATYFCQQFKSYPLTFGQGTKLEIK |

A-H.58

| | | |
|---|---|---|
| SEQ ID NO: | VH + VL (ScFv) | QVQLVQSGAEVKKPGSSVKVSCKASGHDFRLTYIH |
| 1327 | | WVRQAPGQGLEWMGRVSAGSGNVKYNEKFKGRVT |
| | | ITADTSTSTAYMELSSLRSEDTAVYYCAVSYYSYDV |
| | | LDYWGQGTTVTVSSGGGGSGGGGSGGGGSGGGGS |
| | | DIQMTQSPSFLSASVGDRVTITCKASQNVGNRVVWH |
| | | QQKPGKAPKALIYSSSHRYKGVPSRFSGSGSGTEFTL |
| | | TISSLQPEDFATYFCQQFKSYPLTFGQGTKLEIK |

A-H.59

| | | |
|---|---|---|
| SEQ ID NO: | VH + VL (ScFv) | QVQLVQSGAEVKKPGSSVKVSCKASGHDFRLTYIH |
| 1328 | | WVRQAPGQGLEWMGRIYAGSGNVKYNEKFKGRVTI |
| | | TADTSTSTAYMELSSLRSEDTAVYYCAVSYYSYDVL |
| | | DYWGQGTTVTVSSGGGGSGGGGSGGGGSGGGGSDI |
| | | QMTQSPSFLSASVGDRVTITCKASQNVADRVVWHQ |
| | | QKPGKAPKALIYSSSHRYKGVPSRFSGSGSGTEFTLTI |
| | | SSLQPEDFATYFCQQFKSYPLTFGQGTKLEIK |

A-H.60

| | | |
|---|---|---|
| SEQ ID NO: | VH + VL (ScFv) | QVQLVQSGAEVKKPGSSVKVSCKASGHDFKLTYIH |
| 1329 | | WVRQAPGQGLEWMGRVSAGSGNTKYNEKFKGRVT |
| | | ITADTSTSTAYMELSSLRSEDTAVYYCAVSYYSYDV |
| | | LDYWGQGTTVTVSSGGGGSGGGGSGGGGSGGGGS |
| | | DIQMTQSPSFLSASVGDRVTITCKASQNVGDRVAWH |
| | | QQKPGKAPKALIYSSSHRYKGVPSRFSGSGSGTEFTL |
| | | TISSLQPEDFATYFCQQFKSYPLTFGQGTKLEIK |

A-H.61

| | | |
|---|---|---|
| SEQ ID NO: | VH + VL (ScFv) | QVQLVQSGAEVKKPGSSVKVSCKASGHDFKLTYIH |
| 1330 | | WVRQAPGQGLEWMGRVSAGSGNTKYNEKFKGRVT |
| | | ITADTSTSTAYMELSSLRSEDTAVYYCAVSYYSYDV |
| | | LDYWGQGTTVTVSSGGGGSGGGGSGGGGSGGGGS |
| | | DIQMTQSPSFLSASVGDRVTITCKASQNVDNRVAWH |
| | | QQKPGKAPKALIYSSSHRYKGVPSRFSGSGSGTEFTL |
| | | TISSLQPEDFATYFCQQFKSYPLTFGQGTKLEIK |

A-H.62

| | | |
|---|---|---|
| SEQ ID NO: | VH + VL (ScFv) | QVQLVQSGAEVKKPGSSVKVSCKASGHDFRLTYIH |
| 1331 | | WVRQAPGQGLEWMGRVSAGSGNVKYNEKFKGRVT |
| | | ITADTSTSTAYMELSSLRSEDTAVYYCAVSYYSYDV |
| | | LDYWGQGTTVTVSSGGGGSGGGGSGGGGSGGGGS |
| | | DIQMTQSPSFLSASVGDRVTITCKASQNVADRVVWH |
| | | QQKPGKAPKALIYSSSHRYKGVPSRFSGSGSGTEFTL |
| | | TISSLQPEDFATYFCQQFKSYPLTFGQGTKLEIK |

A-H.63

| | | |
|---|---|---|
| SEQ ID NO: | VH + VL (ScFv) | QVQLVQSGAEVKKPGSSVKVSCKASGHDFRLTYIH |
| 1332 | | WVRQAPGQGLEWMGRVYAGSGNTKYNEKFKGRVT |
| | | ITADTSTSTAYMELSSLRSEDTAVYYCAVSYYSYDV |
| | | LDYWGQGTTVTVSSGGGGSGGGGSGGGGSGGGGS |
| | | DIQMTQSPSFLSASVGDRVTITCKASQNVEDRVVWH |
| | | QQKPGKAPKALIYSSSHRYKGVPSRFSGSGSGTEFTL |
| | | TISSLQPEDFATYFCQQFKSYPLTFGQGTKLEIK |

A-H.64

| | | |
|---|---|---|
| SEQ ID NO: | VH + VL (ScFv) | QVQLVQSGAEVKKPGSSVKVSCKASGHDFKLTYIH |
| 1333 | | WVRQAPGQGLEWMGRVSAGSGNTKYNEKFKGRVT |
| | | ITADTSTSTAYMELSSLRSEDTAVYYCAVSYYSYDV |
| | | LDYWGQGTTVTVSSGGGGSGGGGSGGGGSGGGGS |
| | | DIQMTQSPSFLSASVGDRVTITCKASQNVADRVVWH |
| | | QQKPGKAPKALIYSSSHRYKGVPSRFSGSGSGTEFTL |
| | | TISSLQPEDFATYFCQQFKSYPLTFGQGTKLEIK |

A-H.65

| | | |
|---|---|---|
| SEQ ID NO: | VH + VL (ScFv) | QVQLVQSGAEVKKPGSSVKVSCKASGHDFKLTYIH |
| 1334 | | WVRQAPGQGLEWMGRISAGSGNTKYNEKFKGRVTI |
| | | TADTSTSTAYMELSSLRSEDTAVYYCAVSYYSYDVL |
| | | DYWGQGTTVTVSSGGGGSGGGGSGGGGSGGGGSDI |
| | | QMTQSPSFLSASVGDRVTITCKASQNVGDRVVWHQ |
| | | QKPGKAPKALIYSSSHRYKGVPSRFSGSGSGTEFTLTI |
| | | SSLQPEDFATYFCQQFKSYPLTFGQGTKLEIK |

A-H.66

| | | |
|---|---|---|
| SEQ ID NO: | VH + VL (ScFv) | QVQLVQSGAEVKKPGSSVKVSCKASGHDFKLTYIH |
| 1335 | | WVRQAPGQGLEWMGRIYAGSGNTKYNEKFKGRVTI |
| | | TADTSTSTAYMELSSLRSEDTAVYYCAVSYYSYDVL |
| | | DYWGQGTTVTVSSGGGGSGGGGSGGGGSGGGGSDI |
| | | QMTQSPSFLSASVGDRVTITCKASQNVGDRVVWHQ |
| | | QKPGKAPKALIYSSSHRYKGVPSRFSGSGSGTEFTLTI |
| | | SSLQPEDFATYFCQQFKSYPLTFGQGTKLEIK |

A-H.67

| | | |
|---|---|---|
| SEQ ID NO: | VH + VL (ScFv) | QVQLVQSGAEVKKPGSSVKVSCKASGTDFKLTYIH |
| 1336 | | WVRQAPGQGLEWMGRIFPGSGNVKYNEKFKGRVTI |
| | | TADTSTSTAYMELSSLRSEDTAVYYCAVSYYSYDVL |
| | | DYWGQGTTVTVSSGGGGSGGGGSGGGGSGGGGSDI |
| | | QMTQSPSFLSASVGDRVTITCKASQNVDNRVAWYQ |
| | | QKPGKAPKALIYSSSHRYKGVPSRFSGSGSGTEFTLTI |
| | | SSLQPEDFATYFCQQFKSYPLTFGQGTKLEIK |

A-H.68

| | | |
|---|---|---|
| SEQ ID NO: | VH + VL (ScFv) | QVQLVQSGAEVKKPGSSVKVSCKASGHDFRLTYIH |
| 1337 | | WVRQAPGQGLEWMGRISAGSGNVKYNEKFKGRVTI |
| | | TADTSTSTAYMELSSLRSEDTAVYYCAVSYYSYDVL |
| | | DYWGQGTTVTVSSGGGGSGGGGSGGGGSGGGGSDI |
| | | QMTQSPSFLSASVGDRVTITCKASQNVADRVAWYQ |
| | | QKPGKAPKALIYSSSHRYKGVPSRFSGSGSGTEFTLTI |
| | | SSLQPEDFATYFCQQFKSYPLTFGQGTKLEIK |

A-H.69 (also referred to as A-H.13)

| | | |
|---|---|---|
| SEQ ID NO: 110 | VH + VL (ScFv) | QVQLVQSGAEVKKPGSSVKVSCKASGTDFKLTYIH |
| | | WVRQAPGQGIEWMGRIFPGSGNVKYNEKIKGRVTI |
| | | TADTSTSTAYMEISSIRSEDTAVYYQAGSYYSYdw |
| | | DYWGQ01TV1VSSGGGGSGGGGSGGGGSGGGGSDI |
| | | QMTQSPSFLSASVGDRVTITCKASQNVDNRVAWYQ |
| | | QKPGKAPKALIYSSSHRYKGVPSRFSGSGSGTEFTLTI |
| | | SSLQPEDFATYFCQQFKSYPLTFGQGTKLEIK |

A-H humanized-matured VH

| | | |
|---|---|---|
| SEQ ID NO: | VH-humanized | QVQLVQSGAEVKKPGSSVKVSCKASGTDFKLTYIH |
| 1310 | matured 1 | WVRQAPGQGLEWMGRIFPGSGNVKYNEKFKGRVTI |
| | | TADTSTSTAYMELSSLRSEDTAVYYCAGSYYSYDVL |
| | | DYWGQGTTVTVSS |
| SEQ ID NO: | VH-humanized | QVQLVQSGAEVKKPGSSVKVSCKASGTDFKLTYIH |
| 1311 | matured 2 | WVRQAPGQGLEWMGRIFPGSGNVKYNEKFKGRVTI |
| | | TADTSTSTAYMELSSLRSEDTAVYYCAVSYYSYDVL |
| | | DYWGQGTTVTVSS |
| SEQ ID NO: | VH-humanized | QVQLVQSGAEVKKPGSSVKVSCKASGHDFRLTYIH |
| 1312 | matured 3 | WVRQAPGQGLEWMGRISAGSGNVKYNEKFKGRVTI |
| | | TADTSTSTAYMELSSLRSEDTAVYYCAVSYYSYDVL |
| | | DYWGQGTTVTVSS |

A-H humanized-matured VL

| | | |
|---|---|---|
| SEQ ID NO: | VL-humanized matured | DIQMTQSPSFLSASVGDRVTITCKASQNVDNRVAWY |
| 1313 | 1 | QQKPGKAPKALIYSSSHRYKGVPSRFSGSGSGTEFTL |
| | | TISSLQPEDFATYFCQQFKSYPLTFGQGTKLEIK |
| SEQ ID NO: | VL-humanized matured | DIQMTQSPSFLSASVGDRVTITCKASQNVADRVAWY |
| 1314 | 2 | QQKPGKAPKALIYSSSHRYKGVPSRFSGSGSGTEFTL |
| | | TISSLQPEDFATYFCQQFKSYPLTFGQGTKLEIK |

A-H.70

| | | |
|---|---|---|
| SEQ ID NO: | VH | QVQLVQSGAEVKKPGSSVKVSCKASGHDFRLTYIH |
| 1346 | (CDRs underlined) | WVRQAPGQGLEWMGRVSAGSGNVKYNEKFKGRVT |
| | | ITADTSTSTAYMELSSLRSEDTAVYYCAVSYYSYDV |
| | | LDYWGQGTTVTVSS |
| SEQ ID NO: | VL | DIQMTQSPSFLSASVGDRVTITCKASQNVGNRVVWH |
| 1347 | (CDRs underlined) | QQKPGKAPKALIYSSSHRYKGVPSRFSGSGSGTEFTL |
| | | TISSLQPEDFATYFCQQFKSYPLTFGQGTKLEIK |

A-H.71

| | | |
|---|---|---|
| SEQ ID NO: | VH | QVQLVQSGAEVKKPGSSVKVSCKASGHDFRLTYIH |
| 1348 | (CDRs underlined) | WVRQAPGQGLEWMGRIYAGSGNVKYNEKFKGRVTI |
| | | TADTSTSTAYMELSSLRSEDTAVYYCAVSYYSYDVL |
| | | DYWGQGTTVTVSS |
| SEQ ID NO: | VL | DIQMTQSPSFLSASVGDRVTITCKASQNVADRVVWH |
| 1349 | (CDRs underlined) | QQKPGKAPKALIYSSSHRYKGVPSRFSGSGSGTEFTL |
| | | TISSLQPEDFATYFCQQFKSYPLTFGQGTKLEIK |

A-H.72

| | | |
|---|---|---|
| SEQ ID NO: | VH | QVQLVQSGAEVKKPGSSVKVSCKASGHDFKLTYIH |
| 1350 | (CDRs underlined) | WVRQAPGQGLEWMGRVSAGSGNTKYNEKFKGRVT |
| | | ITADTSTSTAYMELSSLRSEDTAVYYCAVSYYSYDV |
| | | LDYWGQGTTVTVSS |
| SEQ ID NO: | VL | DIQMTQSPSFLSASVGDRVTITCKASQNVGDRVAWH |
| 1351 | (CDRs underlined) | QQKPGKAPKALIYSSSHRYKGVPSRFSGSGSGTEFTL |
| | | TISSLQPEDFATYFCQQFKSYPLTFGQGTKLEIK |

A-H.73

| | | |
|---|---|---|
| SEQ ID NO: | VH | QVQLVQSGAEVKKPGSSVKVSCKASGHDFKLTYIH |
| 1350 | (CDRs underlined) | WVRQAPGQGLEWMGRVSAGSGNTKYNEKFKGRVT |
| | | ITADTSTSTAYMELSSLRSEDTAVYYCAVSYYSYDV |
| | | LDYWGQGTTVTVSS |
| SEQ ID NO: | VL | DIQMTQSPSFLSASVGDRVTITCKASQNVDNRVAWH |
| 1353 | (CDRs underlined) | QQKPGKAPKALIYSSSHRYKGVPSRFSGSGSGTEFTL |
| | | TISSLQPEDFATYFCQQFKSYPLTFGQGTKLEIK |

A-H.74

| | | |
|---|---|---|
| SEQ ID NO: | VH | QVQLVQSGAEVKKPGSSVKVSCKASGHDFRLTYIH |
| 1346 | (CDRs underlined) | WVRQAPGQGLEWMGRVSAGSGNVKYNEKFKGRVT |
| | | ITADTSTSTAYMELSSLRSEDTAVYYCAVSYYSYDV |
| | | LDYWGQGTTVTVSS |
| SEQ ID NO: | VL | DIQMTQSPSFLSASVGDRVTITCKASQNVADRVVWH |
| 1349 | (CDRs underlined) | QQKPGKAPKALIYSSSHRYKGVPSRFSGSGSGTEFTL |
| | | TISSLQPEDFATYFCQQFKSYPLTFGQGTKLEIK |

A-H.75

| | | |
|---|---|---|
| SEQ ID NO: | VH | QVQLVQSGAEVKKPGSSVKVSCKASGHDFRLTYIH |
| 1356 | (CDRs underlined) | WVRQAPGQGLEWMGRVYAGSGNTKYNEKFKGRVT |
| | | ITADTSTSTAYMELSSLRSEDTAVYYCAVSYYSYDV |
| | | LDYWGQGTTVTVSS |
| SEQ ID NO: | VL | DIQMTQSPSFLSASVGDRVTITCKASQNVEDRVVWH |
| 1357 | (CDRs underlined) | QQKPGKAPKALIYSSSHRYKGVPSRFSGSGSGTEFTL |
| | | TISSLQPEDFATYFCQQFKSYPLTFGQGTKLEIK |

A-H.76

| | | |
|---|---|---|
| SEQ ID NO: | VH | QVQLVQSGAEVKKPGSSVKVSCKASGHDFKLTYIH |
| 1350 | (CDRs underlined) | WVRQAPGQGLEWMGRVSAGSGNTKYNEKFKGRVT |
| | | ITADTSTSTAYMELSSLRSEDTAVYYCAVSYYSYDV |
| | | LDYWGQGTTVTVSS |
| SEQ ID NO: | VL | DIQMTQSPSFLSASVGDRVTITCKASQNVADRVVWH |
| 1349 | (CDRs underlined) | QQKPGKAPKALIYSSSHRYKGVPSRFSGSGSGTEFTL |
| | | TISSLQPEDFATYFCQQFKSYPLTFGQGTKLEIK |

A-H.77

| | | |
|---|---|---|
| SEQ ID NO: | VH | QVQLVQSGAEVKKPGSSVKVSCKASGHDFKLTYIH |
| 1360 | (CDRs underlined) | WVRQAPGQGLEWMGRISAGSGNTKYNEKFKGRVTI |
| | | TADTSTSTAYMELSSLRSEDTAVYYCAVSYYSYDVL |
| | | DYWGQGTTVTVSS |
| SEQ ID NO: | VL | DIQMTQSPSFLSASVGDRVTITCKASQNVGDRVVWH |
| 1361 | (CDRs underlined) | QQKPGKAPKALIYSSSHRYKGVPSRFSGSGSGTEFTL |
| | | TISSLQPEDFATYFCQQFKSYPLTFGQGTKLEIK |

A-H.78

| | | |
|---|---|---|
| SEQ ID NO: | VH | QVQLVQSGAEVKKPGSSVKVSCKASGHDFKLTYIH |
| 1362 | (CDRs underlined) | WVRQAPGQGLEWMGRIYAGSGNTKYNEKFKGRVTI |
| | | TADTSTSTAYMELSSLRSEDTAVYYCAVSYYSYDVL |
| | | DYWGQGTTVTVSS |
| SEQ ID NO: | VL | DIQMTQSPSFLSASVGDRVTITCKASQNVGDRVVWH |
| 1361 | (CDRs underlined) | QQKPGKAPKALIYSSSHRYKGVPSRFSGSGSGTEFTL |
| | | TISSLQPEDFATYFCQQFKSYPLTFGQGTKLEIK |

A-H.79

| | | |
|---|---|---|
| SEQ ID NO: | VH | QVQLVQSGAEVKKPGSSVKVSCKASGHDFKLTYIH |
| 1350 | (CDRs underlined) | WVRQAPGQGLEWMGRVSAGSGNTKYNEKFKGRVT |
| | | ITADTSTSTAYMELSSLRSEDTAVYYCAVSYYSYDV |
| | | LDYWGQGTTVTVSS |
| SEQ ID NO: | VL | DIQMTQSPSFLSASVGDRVTITCRASQNVDNRLGWH |
| 1365 | (CDRs underlined) | QQKPGKAPKALIYSSSHRYKGVPSRFSGSGSGTEFTL |
| | | TISSLQPEDFATYFCQQFKSYPLTFGQGTKLEIK |

A-H.80

| | | |
|---|---|---|
| SEQ ID NO: | VH | QVQLVQSGAEVKKPGSSVKVSCKASGHDFKLTYIH |
| 1350 | (CDRs underlined) | WVRQAPGQGLEWMGRVSAGSGNTKYNEKFKGRVT |
| | | ITADTSTSTAYMELSSLRSEDTAVYYCAVSYYSYDV |
| | | LDYWGQGTTVTVSS |
| SEQ ID NO: | VL | DIQMTQSPSFLSASVGDRVTITCKASQNVDNRVAWH |
| 1367 | (CDRs underlined) | QQKPGKAPKALIYAASSLQKGVPSRFSGSGSGTEFTL |
| | | TISSLQPEDFATYFCQQFKSYPLTFGQGTKLEIK |

A-H.81

| | | |
|---|---|---|
| SEQ ID NO: | VH | QVQLVQSGAEVKKPGSSVKVSCKASGHDFKLTYIH |
| 1350 | (CDRs underlined) | WVRQAPGQGLEWMGRVSAGSGNTKYNEKFKGRVT |
| | | ITADTSTSTAYMELSSLRSEDTAVYYCAVSYYSYDV |
| | | LDYWGQGTTVTVSS |
| SEQ ID NO: | VL | DIQMTQSPSFLSASVGDRVTITCKASQNVDNRVAWH |
| 1369 | (CDRs underlined) | QQKPGKAPKALIYSSSHRYKGVPSRFSGSGSGTEFTL |
| | | TISSLQPEDFATYFCLQHNSYPLTFGQGTKLEIK |

A-H.82

| | | |
|---|---|---|
| SEQ ID NO: | VH | QVQLVQSGAEVKKPGSSVKVSCKASGHDFKLTYIH |
| 1370 | (CDRs underlined) | WVRQAPGQGLEWMGRVSAGSGNVNYAQKFQGRVT |
| | | ITADTSTSTAYMELSSLRSEDTAVYYCAVSYYSYDV |
| | | LDYWGQGTTVTVSS |
| SEQ ID NO: | VL | DIQMTQSPSFLSASVGDRVTITCRASQNVDNRLGWH |
| 1365 | (CDRs underlined) | QQKPGKAPKALIYSSSHRYKGVPSRFSGSGSGTEFTL |
| | | TISSLQPEDFATYFCQQFKSYPLTFGQGTKLEIK |

A-H.83

| | | |
|---|---|---|
| SEQ ID NO: | VH | QVQLVQSGAEVKKPGSSVKVSCKASGHDFKLTYIH |
| 1370 | (CDRs underlined) | WVRQAPGQGLEWMGRVSAGSGNVNYAQKFQGRVT |
| | | ITADTSTSTAYMELSSLRSEDTAVYYCAVSYYSYDV |
| | | LDYWGQGTTVTVSS |
| SEQ ID NO: | VL | DIQMTQSPSFLSASVGDRVTITCKASQNVDNRVAWH |
| 1367 | (CDRs underlined) | QQKPGKAPKALIYAASSLQKGVPSRFSGSGSGTEFTL |
| | | TISSLQPEDFATYFCQQFKSYPLTFGQGTKLEIK |

A-H.84

| | | |
|---|---|---|
| SEQ ID NO: | VH | QVQLVQSGAEVKKPGSSVKVSCKASGHDFKLTYIH |
| 1370 | (CDRs underlined) | WVRQAPGQGLEWMGRVSAGSGNVNYAQKFQGRVT |
| | | ITADTSTSTAYMELSSLRSEDTAVYYCAVSYYSYDV |
| | | LDYWGQGTTVTVSS |
| SEQ ID NO: | VL | DIQMTQSPSFLSASVGDRVTITCKASQNVDNRVAWH |
| 1369 | (CDRs underlined) | QQKPGKAPKALIYSSSHRYKGVPSRFSGSGSGTEFTL |
| | | TISSLQPEDFATYFCLQHNSYPLTFGQGTKLEIK |

A-H.85

| | | |
|---|---|---|
| SEQ ID NO: | VH (CDRs underlined) | QVQLVQSGAEVKKPGSSVKVSCKASGHDFRLTYIH |
| 1344 | | WVRQAPGQGLEWMGRVSAGSGNTKYNEKFKGRVT |
| | | ITADTSTSTAYMELSSLRSEDTAVYYCAVSYYSYDV |
| | | LDYWGQGTTVTVSS |
| SEQ ID NO: | VL | DIQMTQSPSFLSASVGDRVTITCKASQNVGDRVVWH |
| 1361 | (CDRs underlined) | QQKPGKAPKALIYSSSHRYKGVPSRFSGSGSGTEFTL |
| | | TISSLQPEDFATYFCQQFKSYPLTFGQGTKLEIK |

[0360] In some embodiments, the anti-TCRβV antibody molecule, e.g., anti-TCRβ V6 (e.g., anti-TCRβ V6-5*01) antibody molecule comprises a VH and/or a VL of an antibody described in TABLE 1A, or a sequence with at least 80%, 85%, 90%, 95%, 96%, 97%, 98%, 99% or more identity thereto.

[0361] In some embodiments, the anti-TCRβV antibody molecule, e.g., anti-TCRβ V6 (e.g., anti-TCRβ V6-5*01) antibody molecule comprises a VH and a VL of an antibody described in TABLE 1A, or a sequence with at least 80%, 85%, 90%, 95%, 96%, 97%, 98%, 99% or more identity thereto.

[0362] In some embodiments, an anti-TCRVb antibody disclosed herein has an antigen binding domain having a VL having a consensus sequence of SEQ ID NO: 259, wherein position 30 is G, E, A or D; position 31 is N or D; position 32 is R or K; position 36 is Y or H; and/or position 56 is K or S.

[0363] In some embodiments, an anti-TCRVb antibody disclosed herein has an antigen binding domain having a VH having a consensus sequence of SEQ ID NO: 260, wherein: position 27 is H or T or G or Y; position 28 is D or T or S; position 30 is H or R or D or K or T; position 31 is L or D or K or T or N; position 32 is W or F or T or I or Y or G; position 49 is R or W; position 50 is V or I or F; position 51 is F or S or Y; position 52 is A or P; position 56 is N or S; position 57 is T or V or Y or I; position 58 is K or R; position 97 is G or V; position 99 is Y or I; position 102 is Y or A; and/or position 103 is D or G.

### Anti-TCRβ V12 Antibodies

[0364] Accordingly, in one aspect, the disclosure provides an anti-TCRβV antibody molecule that binds to human TCRβ V12, e.g., a TCRβ V12 subfamily comprising: TCRβ V12-4*01, TCRβ V12-3*01 or TCRβ V12-5*01. In some embodiments the TCRβ V12 subfamily comprises TCRβ V12-4*01. In some embodiments the TCRβ V12 subfamily comprises TCRβ V12-3*01.

[0365] In some embodiments, the anti-TCRβV antibody molecule, e.g., anti-TCRβ V12 antibody molecule, is a non-murine antibody molecule, e.g., a human or humanized antibody molecule. In some embodiments, the anti-TCRβV antibody molecule, e.g., anti-TCRβ V12 antibody molecule is a human antibody molecule. In some embodiments, the anti-TCRβV antibody molecule, e.g., anti-TCRβ V12 antibody molecule is a humanized antibody molecule.

[0366] In some embodiments, the anti-TCRβV antibody molecule, e.g., anti-TCRβ V12 antibody molecule, is isolated or recombinant.

[0367] In some embodiments, the anti-TCRβV antibody molecule, e.g., anti-TCRβ V12 antibody molecule, comprises at least one antigen-binding region, e.g., a variable region or an antigen-binding fragment thereof, from an antibody described herein, e.g., an antibody described in Table 2A, or encoded by a nucleotide sequence in Table 2A, or a sequence substantially identical (e.g., at least 80%, 85%, 90%, 92%, 95%, 97%, 98%, 99% or higher identical) to any of the aforesaid sequences.

[0368] In some embodiments, the anti-TCRβV antibody molecule, e.g., anti-TCRβ V12 antibody molecule, comprises at least one, two, three or four variable regions from an antibody described herein, e.g., an antibody as described in Table 2A, or encoded by a nucleotide sequence in Table 2A, or a sequence substantially identical (e.g., at least 80%, 85%, 90%, 92%, 95%, 97%, 98%, 99% or higher identical) to any of the aforesaid sequences.

[0369] In some embodiments, the anti-TCRβV antibody molecule, e.g., anti-TCRβ V12 antibody molecule, comprises at least one or two heavy chain variable regions from an antibody described herein, e.g., an antibody as described in Table 2A, or encoded by a nucleotide sequence in Table 2A, or a sequence substantially identical (e.g., at least 80%, 85%, 90%, 92%, 95%, 97%, 98%, 99% or higher identical) to any of the aforesaid sequences.

[0370] In some embodiments, the anti-TCRβV antibody molecule, e.g., anti-TCRβ V12 antibody molecule, comprises at least one or two light chain variable regions from an antibody described herein, e.g., an antibody as described in Table 2A, or encoded by a nucleotide sequence in Table 2A, or a sequence substantially identical (e.g., at least 80%, 85%, 90%, 92%, 95%, 97%, 98%, 99% or higher identical) to any of the aforesaid sequences.

[0371] In some embodiments, the anti-TCRβV antibody molecule, e.g., anti-TCRβ V12 antibody molecule, comprises a heavy chain constant region for an IgG4, e.g., a human IgG4. In still another embodiment, the anti-TCRβV antibody molecule, e.g., anti-TCRβ V12 antibody molecule, includes a heavy chain constant region for an IgG1, e.g., a human IgG1. In one embodiment, the heavy chain constant region comprises an amino sequence set forth in Table 3A, or a sequence substantially identical (e.g., at least 80%, 85%, 90%, 92%, 95%, 97%, 98%, 99% or higher identical) thereto.

[0372] In some embodiments, the anti-TCRβV antibody molecule, e.g., anti-TCRβ V12 antibody molecule, includes a kappa light chain constant region, e.g., a human kappa light chain constant region. In one embodiment, the light chain constant region comprises an amino sequence set forth in Table 3A, or a sequence substantially identical (e.g., at least 80%, 85%, 90%, 92%, 95%, 97%, 98%, 99% or higher identical) thereto.

[0373] In some embodiments, the anti-TCRβV antibody molecule, e.g., anti-TCRβ V12 antibody molecule, includes at least one, two, or three complementarity determining regions (CDRs) from a heavy chain variable region of an antibody described herein, e.g., an antibody as described in Table 2A, or encoded by the nucleotide sequence in Table 2A, or a sequence substantially identical (e.g., at least 80%, 85%, 90%, 92%, 95%, 97%, 98%, 99% or higher identical) to any of the aforesaid sequences.

[0374] In some embodiments, the anti-TCRβV antibody molecule, e.g., anti-TCRβ V12 antibody molecule, includes at least one, two, or three CDRs (or collectively all of the CDRs) from a heavy chain variable region comprising an amino acid sequence shown in Table 2A, or encoded by a nucleotide sequence shown in Table 2A. In one embodiment, one or more of the CDRs (or collectively all of the CDRs) have one, two, three, four, five, six or more changes, e.g., amino acid substitutions or deletions, relative to the amino acid sequence shown in Table 2A, or encoded by a nucleotide sequence shown in Table 2A.

[0375] In some embodiments, the anti-TCRβV antibody molecule, e.g., anti-TCRβ V12 antibody molecule, includes at least one, two, or three complementarity determining regions (CDRs) from a light chain variable region of an antibody described herein, e.g., an antibody as described in Table 2A, or encoded by the nucleotide sequence in Table 2A, or a sequence substantially identical (e.g., at least 80%, 85%, 90%, 92%, 95%, 97%, 98%, 99% or higher identical) to any of the aforesaid sequences.

[0376] In some embodiments, the anti-TCRβV antibody molecule, e.g., anti-TCRβ V12 antibody molecule, includes at least one, two, or three CDRs (or collectively all of the CDRs) from a light chain variable region comprising an amino acid sequence shown in Table 2A, or encoded by a nucleotide sequence shown in Table 2A. In one embodiment, one or more of the CDRs (or collectively all of the CDRs) have one, two, three, four, five, six or more changes, e.g., amino acid substitutions or deletions, relative to the amino acid sequence shown in Table 2A, or encoded by a nucleotide sequence shown in Table 2A.

[0377] In some embodiments, the anti-TCRβV antibody molecule, e.g., anti-TCRβ V12 antibody molecule, includes at least one, two, three, four, five or six CDRs (or collectively all of the CDRs) from a heavy and light chain variable region comprising an amino acid sequence shown in Table 2A, or encoded by a nucleotide sequence shown in Table 2A. In one embodiment, one or more of the CDRs (or collectively all of the CDRs) have one, two, three, four, five, six or more changes, e.g., amino acid substitutions or deletions, relative to the amino acid sequence shown in Table 2A, or encoded by a nucleotide sequence shown in Table 2A.

[0378] In some embodiments, the anti-TCRβV antibody molecule, e.g., anti-TCRβ V12 antibody molecule, molecule includes all six CDRs from an antibody described herein, e.g., an antibody as described in Table 2A, or encoded by the nucleotide sequence in Table 2A, or closely related CDRs, e.g., CDRs which are identical or which have at least one amino acid alteration, but not more than two, three or four alterations (e.g., substitutions, deletions, or insertions, e.g., conservative substitutions). In some embodiments, the anti-TCRβV antibody molecule, e.g., anti-TCRβ V12 antibody molecule, may include any CDR described herein.

[0379] In some embodiments, the anti-TCRβV antibody molecule, e.g., anti-TCRβ V12 antibody molecule includes at least one, two, or three CDRs according to Kabat et al. (e.g., at least one, two, or three CDRs according to the Kabat definition as set out in Table 2A) from a heavy chain variable region of an antibody described herein, e.g., an antibody chosen as described in Table 2A, or a sequence substantially identical (e.g., at least 80%, 85%, 90%, 92%, 95%, 97%, 98%, 99% or higher identical) to any of the aforesaid sequences; or which have at least one amino acid alteration, but not more than two, three or four alterations (e.g., substitutions, deletions, or insertions, e.g., conservative substitutions) relative to one, two, or three CDRs according to Kabat et al. shown in Table 2A.

[0380] In some embodiments, the anti-TCRβV antibody molecule, e.g., anti-TCRβ V12 antibody molecule includes at least one, two, or three CDRs according to Kabat et al. (e.g., at least one, two, or three CDRs according to the Kabat definition as set out in Table 2A) from a light chain variable region of an antibody described herein, e.g., an antibody as described in Table 2A, or a sequence substantially identical (e.g., at least 80%, 85%, 90%, 92%, 95%, 97%, 98%, 99% or higher identical) to any of the aforesaid sequences; or which have at least one amino acid alteration, but not more than two, three or four alterations (e.g., substitutions, deletions, or insertions, e.g., conservative substitutions) relative to one, two, or three CDRs according to Kabat et al. shown in Table 2A.

[0381] In some embodiments, the anti-TCRβV antibody molecule, e.g., anti-TCRβ V12 antibody molecule includes at least one, two, three, four, five, or six CDRs according to Kabat et al. (e.g., at least one, two, three, four, five, or six CDRs according to the Kabat definition as set out in Table 2A) from the heavy and light chain variable regions of an antibody described herein, e.g., an antibody as described in Table 2A, or encoded by the nucleotide sequence in Table 2A; or a sequence substantially identical (e.g., at least 80%, 85%, 90%, 92%, 95%, 97%, 98%, 99% or higher identical) to any of the aforesaid sequences; or which have at least one amino acid alteration, but not more than two, three or four alterations (e.g., substitutions, deletions, or insertions, e.g., conservative substitutions) relative to one, two, three, four, five, or six CDRs according to Kabat et al. shown in Table 2A.

[0382] In some embodiments, the anti-TCRβV antibody molecule, e.g., anti-TCRβ V12 antibody molecule includes all six CDRs according to Kabat et al. (e.g., all six CDRs according to the Kabat definition as set out in Table 2A) from the heavy and light chain variable regions of an antibody described herein, e.g., an antibody as described in Table 2A, or encoded by the nucleotide sequence in Table 2A; or encoded by the nucleotide sequence in Table 2A; or a sequence substantially identical (e.g., at least 80%, 85%, 90%, 92%, 95%, 97%, 98%, 99% or higher identical) to any of the aforesaid sequences; or which have at least one amino acid alteration, but not more than two, three or four alterations (e.g., substitutions, deletions, or insertions, e.g., conservative substitutions) relative to all six CDRs according to Kabat et al. shown in Table 2A. In some embodiments, the anti-TCRβV antibody molecule, e.g., anti-TCRβ V12 antibody molecule may include any CDR described herein.

[0383] In some embodiments, the anti-TCRβV antibody molecule, e.g., anti-TCRβ V12 antibody molecule includes at least one, two, or three hypervariable loops that have the same canonical structures as the corresponding hypervariable loop of an antibody described herein, e.g., an antibody described in Table 2A, e.g., the same canonical structures as at least loop 1 and/or loop 2 of the heavy and/or light chain variable domains of an antibody described herein. See, e.g., Chothia et al., (1992) J. Mol. Biol. 227:799-817; Tomlinson et al., (1992) J. Mol. Biol. 227:776-798 for descriptions of hypervariable loop canonical structures. These structures can be determined by inspection of the tables described in these references.

[0384] In some embodiments, the anti-TCRβV antibody molecule, e.g., anti-TCRβ V12 antibody molecule includes at least one, two, or three CDRs according to Chothia et al. (e.g., at least one, two, or three CDRs according to the Chothia definition as set out in Table 2A) from a heavy chain variable region of an antibody described herein, e.g., an antibody chosen as described in Table 2A, or a sequence substantially identical (e.g., at least 80%, 85%, 90%, 92%, 95%, 97%, 98%, 99% or higher identical) to any of the aforesaid sequences; or which have at least one amino acid alteration, but not more than two, three or four alterations (e.g., substitutions, deletions, or insertions, e.g., conservative substitutions) relative to one, two, or three CDRs according to Chothia et al. shown in Table 2A.

[0385] In some embodiments, the anti-TCRβV antibody molecule, e.g., anti-TCRβ V12 antibody molecule includes at least one, two, or three CDRs according to Chothia et al. (e.g., at least one, two, or three CDRs according to the Chothia definition as set out in Table 2A) from a light chain variable region of an antibody described herein, e.g., an antibody as described in Table 2A, or a sequence substantially identical (e.g., at least 80%, 85%, 90%, 92%, 95%, 97%, 98%, 99% or higher identical) to any of the aforesaid sequences; or which have at least one amino acid alteration, but not more than two, three or four alterations (e.g., substitutions, deletions, or insertions, e.g., conservative substitutions) relative to one, two, or three CDRs according to Chothia et al. shown in Table 2A.

[0386] In some embodiments, the anti-TCRβV antibody molecule, e.g., anti-TCRβ V12 antibody molecule includes at least one, two, three, four, five, or six CDRs according to Chothia et al. (e.g., at least one, two, three, four, five, or six CDRs according to the Chothia definition as set out in Table 2A) from the heavy and light chain variable regions of an antibody described herein, e.g., an antibody as described in Table 2A, or encoded by the nucleotide sequence in Table 2A; or a sequence substantially identical (e.g., at least 80%, 85%, 90%, 92%, 95%, 97%, 98%, 99% or higher identical) to any of the aforesaid sequences; or which have at least one amino acid alteration, but not more than two, three or four alterations (e.g., substitutions, deletions, or insertions, e.g., conservative substitutions) relative to one, two, three, four, five, or six CDRs according to Chothia et al. shown in Table 2A.

[0387] In some embodiments, the anti-TCRβV antibody molecule, e.g., anti-TCRβ V12 antibody molecule includes all six CDRs according to Chothia et al. (e.g., all six CDRs according to the Chothia definition as set out in Table 2A) from the heavy and light chain variable regions of an antibody described herein, e.g., an antibody as described in Table 2A, or encoded by the nucleotide sequence in Table 2A; or encoded by the nucleotide sequence in Table 2A; or a sequence substantially identical (e.g., at least 80%, 85%, 90%, 92%, 95%, 97%, 98%, 99% or higher identical) to any of the aforesaid sequences; or which have at least one amino acid alteration, but not more than two, three or four alterations (e.g., substitutions, deletions, or insertions, e.g., conservative substitutions) relative to all six CDRs according to Chothia et al. shown in Table 2A. In some embodiments, the anti-TCRβV antibody molecule, e.g., anti-TCRβ V12 antibody molecule may include any CDR described herein.

[0388] In some embodiments, the anti-TCRβV antibody molecule, e.g., anti-TCRβ V12 antibody molecule includes at least one, two, or three CDRs according to a combined CDR (e.g., at least one, two, or three CDRs according to the combined CDR definition as set out in Table 2A) from a heavy chain variable region of an antibody described herein, e.g., an antibody chosen as described in Table 2A, or a sequence substantially identical (e.g., at least 80%, 85%, 90%, 92%, 95%, 97%, 98%, 99% or higher identical) to any of the aforesaid sequences; or which have at least one amino acid alteration, but not more than two, three or four alterations (e.g., substitutions, deletions, or insertions, e.g., conservative substitutions) relative to one, two, or three CDRs according to combined CDR shown in Table 2A.

[0389] In some embodiments, the anti-TCRβV antibody molecule, e.g., anti-TCRβ V12 antibody molecule includes at least one, two, or three CDRs according to a combined CDR (e.g., at least one, two, or three CDRs according to the combined CDR definition as set out in Table 2A) from a light chain variable region of an antibody described herein, e.g., an antibody as described in Table 2A, or a sequence substantially identical (e.g., at least 80%, 85%, 90%, 92%, 95%, 97%, 98%, 99% or higher identical) to any of the aforesaid sequences; or which have at least one amino acid alteration, but not more than two, three or four alterations (e.g., substitutions, deletions, or insertions, e.g., conservative substitutions) relative to one, two, or three CDRs according to a combined CDR shown in Table 2A.

[0390] In some embodiments, the anti-TCRβV antibody molecule, e.g., anti-TCRβ V12 antibody molecule includes at least one, two, three, four, five, or six CDRs according to a combined CDR. (e.g., at least one, two, three, four, five, or six CDRs according to the combined CDR definition as set out in Table 2A) from the heavy and light chain variable regions of an antibody described herein, e.g., an antibody as described in Table 2A, or encoded by the nucleotide sequence in Table 2A; or a sequence substantially identical (e.g., at least 80%, 85%, 90%, 92%, 95%, 97%, 98%, 99% or higher identical) to any of the aforesaid sequences; or which have at least one amino acid alteration, but not more than two, three or four alterations (e.g., substitutions, deletions, or insertions, e.g., conservative substitutions) relative to one, two, three, four, five, or six CDRs according to a combined CDR shown in Table 2A.

[0391] In some embodiments, the anti-TCRβV antibody molecule, e.g., anti-TCRβ V12 antibody molecule includes all six CDRs according to a combined CDR (e.g., all six CDRs according to the combined CDR definition as set out in Table 2A) from the heavy and light chain variable regions of an antibody described herein, e.g., an antibody as described in Table 2A, or encoded by the nucleotide sequence in Table 2A; or encoded by the nucleotide sequence in Table 2A; or a sequence substantially identical (e.g., at least 80%, 85%, 90%, 92%, 95%, 97%, 98%, 99% or higher identical) to any of the aforesaid sequences; or which have at least one amino acid alteration, but not more than two, three or four alterations (e.g., substitutions, deletions, or insertions, e.g., conservative substitutions) relative to all six CDRs according to a combined CDR shown in Table 2A. In some embodiments, the anti-TCRβV antibody molecule, e.g., anti-TCRβ V12 antibody molecule may include any CDR described herein.

[0392] In some embodiments, a combined CDR as set out in TABLE 2A is a CDR that comprises a Kabat CDR and a Chothia CDR.

[0393] In some embodiments, the anti-TCRβV antibody molecule, e e.g., anti-TCRβ V12 antibody molecule, molecule includes a combination of CDRs or hypervariable loops identified as combined CDRs in TABLE 2A. In some embodiments, the anti-TCRβV antibody molecule, e.g., anti-TCRβ V12 antibody molecule, can contain any combination of CDRs or hypervariable loops according the “combined” CDRs are described in TABLE 2A.

[0394] In some embodiments, the anti-TCRβV antibody molecule, e.g., anti-TCRβ V12 antibody molecule includes a combination of CDRs or hypervariable loops defined according to the Kabat et al. and Chothia et al., or as described in TABLE 2A

[0395] In some embodiments, the anti-TCRβV antibody molecule, e.g., anti-TCRβ V12 antibody molecule can contain any combination of CDRs or hypervariable loops according to the Kabat and Chothia definitions.

[0396] In an embodiment, e.g., an embodiment comprising a variable region, a CDR (e.g., a combined CDR, Chothia CDR or Kabat CDR), or other sequence referred to herein, e.g., in Table 2A, the antibody molecule is a monospecific antibody molecule, a bispecific antibody molecule, a bivalent antibody molecule, a biparatopic antibody molecule, or an antibody molecule that comprises an antigen binding fragment of an antibody, e.g., a half antibody or antigen binding fragment of a half antibody. In certain embodiments the antibody molecule comprises a multispecific molecule, e.g., a bispecific molecule, e.g., as described herein.

[0397] In some embodiments, the anti-TCRβV antibody molecule, e.g., anti-TCRβ V12 antibody molecule includes:

(i) one, two or all of a light chain complementarity determining region 1 (LC CDR1), a light chain complementarity determining region 2 (LC CDR2), and a light chain complementarity determining region 3 (LC CDR3) of SEQ ID NO: 16, SEQ ID NO: 238, SEQ ID NO: 239, SEQ ID NO: 240, SEQ ID NO: 241 or SEQ ID NO: 242, and/or
(ii) one, two or all of a heavy chain complementarity determining region 1 (HC CDR1), heavy chain complementarity determining region 2 (HC CDR2), and a heavy chain complementarity determining region 3 (HC CDR3) of SEQ ID NO: 15, SEQ ID NO: 308, SEQ ID NO: 3438 or SEQ ID NO: 309.

[0398] In some embodiments, the anti-TCRβV antibody molecule, e.g., anti-TCRβ V12 antibody molecule comprises:

(i) a LC CDR1 amino acid sequence of SEQ ID NO: 235, a LC CDR2 amino acid sequence of SEQ ID NO: 236, or a LC CDR3 amino acid sequence of SEQ ID NO: 237; and/or
(ii) a HC CDR1 amino acid sequence of SEQ ID NO: 152, a HC CDR2 amino acid sequence of SEQ ID NO: 226, or a HC CDR3 amino acid sequence of SEQ ID NO: 234.

[0399] In some embodiments, the anti-TCRβV antibody molecule, e.g., anti-TCRβ V12 antibody molecule comprises:

(i) a light chain variable region (VL) comprising a LC CDR1 amino acid sequence of SEQ ID NO: 235, a LC CDR2 amino acid sequence of SEQ ID NO: 236, and a LC CDR3 amino acid sequence of SEQ ID NO: 2; and/or
(ii) a heavy chain variable region (VH) comprising a HC CDR1 amino acid sequence of SEQ ID NO: 152, a HC CDR2 amino acid sequence of SEQ ID NO: 226, and a HC CDR3 amino acid sequence of SEQ ID NO: 234.

[0400] In some embodiments, the anti-TCRβV antibody molecule, e.g., anti-TCRβ V12 antibody molecule comprises:

(i) a LC CDR1 amino acid sequence of SEQ ID NO: 235, a LC CDR2 amino acid sequence of SEQ ID NO: 64, or a LC CDR3 amino acid sequence of SEQ ID NO: 65; and/or
(ii) a HC CDR1 amino acid sequence of SEQ ID NO: 57, a HC CDR2 amino acid sequence of SEQ ID NO: 58, or a HC CDR3 amino acid sequence of SEQ ID NO: 59.

[0401] In some embodiments, the anti-TCRβV antibody molecule, e.g., anti-TCRβ V12 antibody molecule comprises:

(i) a light chain variable region (VL) comprising a LC CDR1 amino acid sequence of SEQ ID NO: 235, a LC CDR2 amino acid sequence of SEQ ID NO: 64, or a LC CDR3 amino acid sequence of SEQ ID NO: 65; and/or
(ii) a heavy chain variable region (VH) comprising a HC CDR1 amino acid sequence of SEQ ID NO: 57, a HC CDR2 amino acid sequence of SEQ ID NO: 58, or a HC CDR3 amino acid sequence of SEQ ID NO: 59.

[0402] In some embodiments, the anti-TCRβV antibody molecule, e.g., anti-TCRβ V12 antibody molecule comprises:

(i) a LC CDR1 amino acid sequence of SEQ ID NO: 66, a LC CDR2 amino acid sequence of SEQ ID NO: 67, or a LC CDR3 amino acid sequence of SEQ ID NO: 68; and/or
(ii) a HC CDR1 amino acid sequence of SEQ ID NO: 60, a HC CDR2 amino acid sequence of SEQ ID NO: 256, or a HC CDR3 amino acid sequence of SEQ ID NO: 234.

[0403] In some embodiments, the anti-TCRβV antibody molecule, e.g., anti-TCRβ V12 antibody molecule comprises:

(i) a light chain variable region (VL) comprising a LC CDR1 amino acid sequence of SEQ ID NO: 235, a LC CDR2 amino acid sequence of SEQ ID NO: 64, or a LC CDR3 amino acid sequence of SEQ ID NO: 65; and/or
(ii) a heavy chain variable region (VH) comprising a HC CDR1 amino acid sequence of SEQ ID NO: 57, a HC CDR2 amino acid sequence of SEQ ID NO: 58, or a HC CDR3 amino acid sequence of SEQ ID NO: 59.

[0404] In one embodiment, the light or the heavy chain variable framework (e.g., the region encompassing at least FR1, FR2, FR3, and optionally FR4) of the anti-TCRβV antibody molecule, e.g., anti-TCRβ V12 antibody molecule can be chosen from: (a) a light or heavy chain variable framework including at least 80%, 85%, 87% 90%, 92%, 93%, 95%, 97%, 98%, or 100% of the amino acid residues from a human light or heavy chain variable framework, e.g., a light or heavy chain variable framework residue from a human mature antibody, a human germline sequence, or a human consensus sequence; (b) a light or heavy chain variable framework including from 20% to 80%, 40% to 60%, 60% to 90%, or 70% to 95% of the amino acid residues from a human light or heavy chain variable framework, e.g., a light or heavy chain variable framework residue from a human mature antibody, a human germline sequence, or a human consensus sequence; (c) a non-human framework (e.g., a rodent framework); or (d) a non-human framework that has been modified, e.g., to remove antigenic or cytotoxic determinants, e.g., deimmunized, or partially humanized. In one embodiment, the light or heavy chain variable framework region (particularly FR1, FR2 and/or FR3) includes a light or heavy chain variable framework sequence at least 70, 75, 80, 85, 87, 88, 90, 92, 94, 95, 96, 97, 98, 99% identical or identical to the frameworks of a VL or VH segment of a human germline gene.

[0405] In some embodiments, the anti-TCRβV antibody molecule, e.g., anti-TCRβ V12 antibody molecule, comprises a heavy chain variable domain having at least one, two, three, four, five, six, seven, ten, fifteen, twenty or more changes, e.g., amino acid substitutions or deletions, from an amino acid sequence described in Table 2A. e.g., the amino acid sequence of the FR region in the entire variable region, e.g., shown in FIGS. 2A and 2B, or in SEQ ID NOs: 308, 3438, and 309.

[0406] Alternatively, or in combination with the heavy chain substitutions described herein the anti-TCRβV antibody molecule, e.g., anti-TCRβ V12 antibody molecule comprises a light chain variable domain having at least one, two, three, four, five, six, seven, ten, fifteen, twenty or more amino acid changes, e.g., amino acid substitutions or deletions, from an amino acid sequence of an antibody described herein e.g., the amino acid sequence of the FR region in the entire variable region, e.g., shown in FIGS. 2A and 2B, or in SEQ ID NOs: 238-242.

[0407] In some embodiments, the anti-TCRβV antibody molecule, e.g., anti-TCRβ V12 antibody molecule includes one, two, three, or four heavy chain framework regions shown in FIG. 2A, or a sequence substantially identical thereto.

[0408] In some embodiments, the anti-TCRβV antibody molecule, e.g., anti-TCRβ V12 antibody molecule includes one, two, three, or four light chain framework regions shown in FIG. 2B, or a sequence substantially identical thereto.

[0409] In some embodiments, the anti-TCRβV antibody molecule, e.g., anti-TCRβ V12 antibody molecule comprises the light chain framework region 1 e.g., as shown in FIG. 2B.

[0410] In some embodiments, the anti-TCRβV antibody molecule, e.g., anti-TCRβ V12 antibody molecule comprises the light chain framework region 2 e.g., as shown in FIG. 2B.

[0411] In some embodiments, the anti-TCRβV antibody molecule, e.g., anti-TCRβ V12 antibody molecule comprises the light chain framework region 3, e.g., as shown in FIG. 2B.

[0412] In some embodiments, the anti-TCRβV antibody molecule, e.g., anti-TCRβ V12 antibody molecule comprises the light chain framework region 4, e.g., as shown in FIG. 2B.

[0413] In some embodiments, the anti-TCRβV antibody molecule, e.g., anti-TCRβ V12 antibody molecule comprises a light chain comprising a framework region, e.g., framework region 1 (FR1), comprising a change, e.g., a substitution (e.g., a conservative substitution) at one or more, e.g., all, position disclosed herein according to Kabat numbering. In some embodiments, FR1 comprises an Aspartic Acid at position 1, e.g., a substitution at position 1 according to Kabat numbering, e.g., an Alanine to Aspartic Acid substitution. In some embodiments, FR1 comprises an Asparagine at position 2, e.g., a substitution at position 2 according to Kabat numbering, e.g., an Isoleucine to Asparagine substitution, Serine to Asparagine substitution or Tyrosine to Asparagine substitution. In some embodiments, FR1 comprises a Leucine at position 4, e.g., a substitution at position 4 according to Kabat numbering, e.g., a Methionine to Leucine substitution.

[0414] In some embodiments, the anti-TCRβV antibody molecule, e.g., anti-TCRβ V12 antibody molecule comprises a light chain comprising a framework region, e.g., framework region 1 (FR1), comprising a substitution at position 1 according to Kabat numbering, e.g., an Alanine to Aspartic Acid substitution, a substitution at position 2 according to Kabat numbering, e.g., an Isoleucine to Asparagine substitution, Serine to Asparagine substitution or Tyrosine to Asparagine substitution, and a substitution at position 4 according to Kabat numbering, e.g., a Methionine to Leucine substitution. In some embodiments, the anti-TCRβV antibody molecule, e.g., anti-TCRβ V12 antibody molecule comprises a light chain comprising a framework region, e.g., framework region 1 (FR1), comprising a substitution at position 1 according to Kabat numbering, e.g., an Alanine to Aspartic Acid substitution, and a substitution at position 2 according to Kabat numbering, e.g., an Isoleucine to Asparagine substitution, Serine to Asparagine substitution or Tyrosine to Asparagine substitution. In some embodiments, the anti-TCRβV antibody molecule, e.g., anti-TCRβ V12 antibody molecule comprises a light chain comprising a framework region, e.g., framework region 1 (FR1), comprising a substitution at position 1 according to Kabat numbering, e.g., an Alanine to Aspartic Acid substitution, and a substitution at position 4 according to Kabat numbering, e.g., a Methionine to Leucine substitution. In some embodiments, the anti-TCRβV antibody molecule, e.g., anti-TCRβ V12 antibody molecule comprises a light chain comprising a framework region, e.g., framework region 1 (FR1), comprising a substitution at position 2 according to Kabat numbering, e.g., an Isoleucine to Asparagine substitution, Serine to Asparagine substitution or Tyrosine to Asparagine substitution, and a substitution at position 4 according to Kabat numbering, e.g., a Methionine to Leucine substitution. In some embodiments, the substitution is relative to a human germline light chain framework region sequence.

[0415] In some embodiments, the anti-TCRβV antibody molecule, e.g., anti-TCRβ V12 antibody molecule comprises a light chain comprising a framework region, e.g., framework region 3 (FR3), comprising a change, e.g., a substitution (e.g., a conservative substitution) at one or more, e.g., all, position disclosed herein according to Kabat numbering. In some embodiments, FR3 comprises a Glycine at position 66, e.g., a substitution at position 66 according to Kabat numbering, e.g., a Lysine to Glycine substitution, or a Serine to Glycine substitution. In some embodiments, FR3 comprises an Asparagine at position 69, e.g., a substitution at position 69 according to Kabat numbering, e.g., a Tyrosine to Asparagine substitution. In some embodiments, FR3 comprises a Tyrosine at position 71, e.g., a substitution at position 71 according to Kabat numbering, e.g., a Phenylalanine to Tyrosine substitution, or an Alanine to Tyrosine substitution.

[0416] In some embodiments, the anti-TCRβV antibody molecule, e.g., anti-TCRβ V12 antibody molecule comprises a light chain comprising a framework region, e.g., framework region 3 (FR3), comprising a substitution at position 66 according to Kabat numbering, e.g., a Lysine to Glycine substitution, or a Serine to Glycine substitution, and a substitution at position 69 according to Kabat numbering, e.g., a Tyrosine to Asparagine substitution. In some embodiments, the anti-TCRβV antibody molecule, e.g., anti-TCRβ V12 antibody molecule comprises a light chain comprising a framework region, e.g., framework region 3 (FR3), comprising a substitution at position 66 according to Kabat numbering, e.g., Lysine to Glycine substitution, or a Serine to Glycine substitution, and a substitution at position 71 according to Kabat numbering, e.g., a Phenylalanine to Tyrosine substitution, or an Alanine to Tyrosine substitution. In some embodiments, the anti-TCRβV antibody molecule, e.g., anti-TCRβ V12 antibody molecule comprises a light chain comprising a framework region, e.g., framework region 3 (FR3), comprising a substitution at position 69 according to Kabat numbering, e.g., a Tyrosine to Asparagine substitution and a substitution at position 71 according to Kabat numbering, e.g., a Phenylalanine to Tyrosine substitution, or an Alanine to Tyrosine substitution. In some embodiments, the anti-TCRβV antibody molecule, e.g., anti-TCRβ V12 antibody molecule comprises a light chain comprising a framework region, e.g., framework region 3 (FR3), comprising a substitution at position 66 according to Kabat numbering, e.g., a Lysine to Glycine substitution, or a Serine to Glycine substitution, a substitution at position 69 according to Kabat numbering, e.g., a Tyrosine to Asparagine substitution and a substitution at position 71 according to Kabat numbering, e.g., a Phenylalanine to Tyrosine substitution, or an Alanine to Tyrosine substitution. In some embodiments, the substitution is relative to a human germline light chain framework region sequence.

[0417] In some embodiments, the anti-TCRβV antibody molecule, e.g., anti-TCRβ V12 antibody molecule comprises a light chain comprising: a framework region 1 (FR1) comprising a substitution at position 2 according to Kabat numbering, e.g., a Isoleucine to Asparagine substitution; and a framework region 3 (FR3), comprising a substitution at position 69 according to Kabat numbering, e.g., a Threonine to Asparagine substitution and a substitution at position 71 according to Kabat numbering, e.g., a Phenylalanine to Tyrosine substitution, e.g., as shown in the amino acid sequence of SEQ ID NO: 238. In some embodiments, the substitution is relative to a human germline light chain framework region sequence.

[0418] In some embodiments, the anti-TCRβV antibody molecule, e.g., anti-TCRβ V12 antibody molecule comprises a light chain comprising: (a) a framework region 1 (FR1) comprising a substitution at position 1 according to Kabat numbering, e.g., a Alanine to Aspartic Acid substitution, and a substitution at position 2 according to Kabat numbering, e.g., a Isoleucine to Asparagine substitution; and (b) a framework region 3 (FR3), comprising a substitution at position 69 according to Kabat numbering, e.g., a Threonine to Asparagine substitution and a substitution at position 71 according to Kabat numbering, e.g., a Phenylalanine to Tyrosine substitution, e.g., as shown in the amino acid sequence of SEQ ID NO: 239 In some embodiments, the substitution is relative to a human germline light chain framework region sequence.

[0419] In some embodiments, the anti-TCRβV antibody molecule, e.g., anti-TCRβ V12 antibody molecule comprises a light chain comprising: (a) a framework region 1 (FR1) comprising a substitution at position 2 according to Kabat numbering, e.g., a Serine to Asparagine substitution; and a substitution at position 4 according to Kabat numbering, e.g., a Methionine to Leucine substitution; and (b) a framework region 3 (FR3), comprising a substitution at position 69 according to Kabat numbering, e.g., a Threonine to Asparagine substitution and a substitution at position 71 according to Kabat numbering, e.g., a Phenylalanine to Tyrosine substitution, e.g., as shown in the amino acid sequence of SEQ ID NO: 240 In some embodiments, the substitution is relative to a human germline light chain framework region sequence.

[0420] In some embodiments, the anti-TCRβV antibody molecule, e.g., anti-TCRβ V12 antibody molecule comprises a light chain comprising: (a) a framework region 1 (FR1) comprising a substitution at position 2 according to Kabat numbering, e.g., a Serine to Asparagine substitution; and (b) a framework region 3 (FR3) comprising a substitution at position 66 according to Kabat numbering, e.g., a Lysine to Glycine substitution; a substitution at position 69 according to Kabat numbering, e.g., a Threonine to Asparagine substitution; and a substitution at position 71 according to Kabat numbering, e.g., a Alanine to Tyrosine substitution, e.g., as shown in the amino acid sequence of SEQ ID NO: 241. In some embodiments, the substitution is relative to a human germline light chain framework region sequence.

[0421] In some embodiments, the anti-TCRβV antibody molecule, e.g., anti-TCRβ V12 antibody molecule comprises a light chain comprising: (a) a framework region 1 (FR1) comprising a substitution at position 2 according to Kabat numbering, e.g., a Tyrosine to Asparagine substitution; and (b) a framework region 3 (FR3) comprising a substitution at position 66 according to Kabat numbering, e.g., a Serine to Glycine substitution; a substitution at position 69 according to Kabat numbering, e.g., a Threonine to Asparagine substitution; and a substitution at position 71 according to Kabat numbering, e.g., a Alanine to Tyrosine substitution, e.g., as shown in the amino acid sequence of SEQ ID NO: 241. In some embodiments, the substitution is relative to a human germline light chain framework region sequence.

[0422] In some embodiments, the anti-TCRβV antibody molecule, e.g., anti-TCRβ V12 antibody molecule comprises a light chain variable domain comprising: (a) a framework region 1 (FR1) comprising a change, e.g., a substitution (e.g., a conservative substitution) at one or more (e.g., all) positions disclosed herein according to Kabat numbering, and (b) a framework region 3 (FR3) comprising a change, e.g., a substitution (e.g., a conservative substitution) at one or more (e.g., all) position disclosed herein according to Kabat numbering. In some embodiments, the substitution is relative to a human germline light chain framework region sequence.

[0423] In some embodiments, the anti-TCRβV antibody molecule, e.g., anti-TCRβ V12 antibody molecule comprises the heavy chain framework region 1, e.g., as shown in FIG. 2A.

[0424] In some embodiments, the anti-TCRβV antibody molecule, e.g., anti-TCRβ V12 antibody molecule comprises the heavy chain framework region 2, e.g., as shown in FIG. 2A.

[0425] In some embodiments, the anti-TCRβV antibody molecule, e.g., anti-TCRβ V12 antibody molecule comprises the heavy chain framework region 3, e.g., as shown in FIG. 2A.

[0426] In some embodiments, the anti-TCRβV antibody molecule, e.g., anti-TCRβ V12 antibody molecule comprises the heavy chain framework region 4, e.g., as shown in FIG. 2A.

[0427] In some embodiments, the anti-TCRβV antibody molecule, e.g., anti-TCRβ V12 antibody molecule comprises the heavy chain framework regions 1-4, e.g., SEQ ID NOS: 235-237 and 308, or as shown in FIG. 2A.

[0428] In some embodiments, the anti-TCRβV antibody molecule, e.g., anti-TCRβ V12 antibody molecule comprises the light chain framework regions 1-4, e.g., SEQ ID NOs: 238-242, or as shown in FIG. 2B.

[0429] In some embodiments, the anti-TCRβV antibody molecule, e.g., anti-TCRβ V12 antibody molecule comprises the heavy chain framework regions 1-4, e.g., SEQ ID NOs: 308, 3438, and 309; and the light chain framework regions 1-4, e.g., SEQ ID NOs: 238-242, or as shown in FIGS. 2A and 2B.

[0430] In some embodiments, the heavy or light chain variable domain, or both, of, the anti-TCRβV antibody molecule, e.g., anti-TCRβ V12 antibody molecule includes an amino acid sequence, which is substantially identical to an amino acid disclosed herein, e.g., at least 80%, 85%, 90%, 92%, 95%, 97%, 98%, 99% or higher identical to a variable region of an antibody described herein, e.g., an antibody as described in Table 2A, or encoded by the nucleotide sequence in Table 2A; or which differs at least 1 or 5 residues, but less than 40, 30, 20, or 10 residues, from a variable region of an antibody described herein.

[0431] In some embodiments, the anti-TCRβV antibody molecule, e.g., anti-TCRβ V12 antibody molecule comprises at least one, two, three, or four antigen-binding regions, e.g., variable regions, having an amino acid sequence as set forth in Table 2A, or a sequence substantially identical thereto (e.g., a sequence at least about 85%, 90%, 95%, 99% or more identical thereto, or which differs by no more than 1, 2, 5, 10, or 15 amino acid residues from the sequences shown in Table 2A. In another embodiment, the anti-TCRβV antibody molecule, e.g., anti-TCRβ V12 antibody molecule includes a VH and/or VL domain encoded by a nucleic acid having a nucleotide sequence as set forth in Table 2A, or a sequence substantially identical thereto (e.g., a sequence at least about 85%, 90%, 95%, 99% or more identical thereto, or which differs by no more than 3, 6, 15, 30, or 45 nucleotides from the sequences shown in Table 2A.

[0432] In some embodiments, the anti-TCRβV antibody molecule, e.g., anti-TCRβ V12 antibody molecule comprises:

a VH domain comprising an amino acid sequence chosen from the amino acid sequence of SEQ ID NO: 308, SEQ ID NO:3438 or SEQ ID NO:309, an amino acid sequence at least about 85%, 90%, 95%, 99% or more identical to the amino acid sequence SEQ ID NO: 308, SEQ ID NO:3438 or SEQ ID NO:309, or an amino acid sequence which differs by no more than 1, 2, 5, 10, or 15 amino acid residues from the amino acid sequence of SEQ ID NO: 308, SEQ ID NO:3438 or SEQ ID NO:309; and/or
a VL domain comprising an amino acid sequence chosen from the amino acid sequence of SEQ ID NO: 238, SEQ ID NO: 239, SEQ ID NO: 240, SEQ ID NO: 241 or SEQ ID NO: 242, an amino acid sequence at least about 85%, 90%, 95%, 99% or more identical to the amino acid sequence of SEQ ID NO: 238, SEQ ID NO: 239, SEQ ID NO: 240, SEQ ID NO: 241 or SEQ ID NO: 242, or an amino acid sequence which differs by no more than 1, 2, 5, 10, or 15 amino acid residues from the amino acid sequence of SEQ ID NO: 238, SEQ ID NO: 239, SEQ ID NO: 240, SEQ ID NO: 241 or SEQ ID NO: 242.

[0433] In some embodiments, the anti-TCRβV antibody molecule, e.g., anti-TCRβ V12 antibody molecule comprises:

a VH domain comprising the amino acid sequence of SEQ ID NO: 308, an amino acid sequence at least about 85%, 90%, 95%, 99% or more identical to the amino acid sequence SEQ ID NO: 308, or an amino acid sequence which differs by no more than 1, 2, 5, 10, or 15 amino acid residues from the amino acid sequence of SEQ ID NO: 308; and
a VL domain comprising the amino acid sequence of SEQ ID NO: 238, an amino acid sequence at least about 85%, 90%, 95%, 99% or more identical to the amino acid sequence SEQ ID NO: 238, or an amino acid sequence which differs by no more than 1, 2, 5, 10, or 15 amino acid residues from the amino acid sequence of SEQ ID NO: 238.

[0434] In some embodiments, the anti-TCRβV antibody molecule, e.g., anti-TCRβ V12 antibody molecule comprises:

a VH domain comprising the amino acid sequence of SEQ ID NO: 308, an amino acid sequence at least about 85%, 90%, 95%, 99% or more identical to the amino acid sequence SEQ ID NO: 308, or an amino acid sequence which differs by no more than 1, 2, 5, 10, or 15 amino acid residues from the amino acid sequence of SEQ ID NO: 308; and
a VL domain comprising the amino acid sequence of SEQ ID NO: 239, an amino acid sequence at least about 85%, 90%, 95%, 99% or more identical to the amino acid sequence SEQ ID NO: 239, or an amino acid sequence which differs by no more than 1, 2, 5, 10, or 15 amino acid residues from the amino acid sequence of SEQ ID NO: 239.

[0435] In some embodiments, the anti-TCRβV antibody molecule, e.g., anti-TCRβ V12 antibody molecule comprises:

a VH domain comprising the amino acid sequence of SEQ ID NO: 308, an amino acid sequence at least about 85%, 90%, 95%, 99% or more identical to the amino acid sequence SEQ ID NO: 308, or an amino acid sequence which differs by no more than 1, 2, 5, 10, or 15 amino acid residues from the amino acid sequence of SEQ ID NO: 308; and
a VL domain comprising the amino acid sequence of SEQ ID NO: 240, an amino acid sequence at least about 85%, 90%, 95%, 99% or more identical to the amino acid sequence SEQ ID NO: 240, or an amino acid sequence which differs by no more than 1, 2, 5, 10, or 15 amino acid residues from the amino acid sequence of SEQ ID NO: 240.

[0436] In some embodiments, the anti-TCRβV antibody molecule, e.g., anti-TCRβ V12 antibody molecule comprises:

a VH domain comprising the amino acid sequence of SEQ ID NO: 308, an amino acid sequence at least about 85%, 90%, 95%, 99% or more identical to the amino acid sequence SEQ ID NO: 308, or an amino acid sequence which differs by no more than 1, 2, 5, 10, or 15 amino acid residues from the amino acid sequence of SEQ ID NO: 308; and
a VL domain comprising the amino acid sequence of SEQ ID NO: 241, an amino acid sequence at least about 85%, 90%, 95%, 99% or more identical to the amino acid sequence SEQ ID NO: 241, or an amino acid sequence which differs by no more than 1, 2, 5, 10, or 15 amino acid residues from the amino acid sequence of SEQ ID NO: 241.

[0437] In some embodiments, the anti-TCRβV antibody molecule, e.g., anti-TCRβ V12 antibody molecule comprises:

a VH domain comprising the amino acid sequence of SEQ ID NO: 308, an amino acid sequence at least about 85%, 90%, 95%, 99% or more identical to the amino acid sequence SEQ ID NO: 308, or an amino acid sequence which differs by no more than 1, 2, 5, 10, or 15 amino acid residues from the amino acid sequence of SEQ ID NO: 308; and
a VL domain comprising the amino acid sequence of SEQ ID NO: 242, an amino acid sequence at least about 85%, 90%, 95%, 99% or more identical to the amino acid sequence SEQ ID NO: 242, or an amino acid sequence which differs by no more than 1, 2, 5, 10, or 15 amino acid residues from the amino acid sequence of SEQ ID NO: 242.

[0438] In some embodiments, the anti-TCRβV antibody molecule, e.g., anti-TCRβ V12 antibody molecule comprises:

a VH domain comprising the amino acid sequence of SEQ ID NO: 3438, an amino acid sequence at least about 85%, 90%, 95%, 99% or more identical to the amino acid sequence SEQ ID NO: 3438, or an amino acid sequence which differs by no more than 1, 2, 5, 10, or 15 amino acid residues from the amino acid sequence of SEQ ID NO: 3438; and
a VL domain comprising the amino acid sequence of SEQ ID NO: 238, an amino acid sequence at least about 85%, 90%, 95%, 99% or more identical to the amino acid sequence SEQ ID NO: 238, or an amino acid sequence which differs by no more than 1, 2, 5, 10, or 15 amino acid residues from the amino acid sequence of SEQ ID NO: 238.

[0439] In some embodiments, the anti-TCRβV antibody molecule, e.g., anti-TCRβ V12 antibody molecule comprises:

a VH domain comprising the amino acid sequence of SEQ ID NO: 3438, an amino acid sequence at least about 85%, 90%, 95%, 99% or more identical to the amino acid sequence SEQ ID NO: 3438, or an amino acid sequence which differs by no more than 1, 2, 5, 10, or 15 amino acid residues from the amino acid sequence of SEQ ID NO: 3438; and
a VL domain comprising the amino acid sequence of SEQ ID NO: 239, an amino acid sequence at least about 85%, 90%, 95%, 99% or more identical to the amino acid sequence SEQ ID NO: 239, or an amino acid sequence which differs by no more than 1, 2, 5, 10, or 15 amino acid residues from the amino acid sequence of SEQ ID NO: 239.

[0440] In some embodiments, the anti-TCRβV antibody molecule, e.g., anti-TCRβ V12 antibody molecule comprises:

a VH domain comprising the amino acid sequence of SEQ ID NO: 3438, an amino acid sequence at least about 85%, 90%, 95%, 99% or more identical to the amino acid sequence SEQ ID NO: 3438, or an amino acid sequence which differs by no more than 1, 2, 5, 10, or 15 amino acid residues from the amino acid sequence of SEQ ID NO: 3438; and
a VL domain comprising the amino acid sequence of SEQ ID NO: 240, an amino acid sequence at least about 85%, 90%, 95%, 99% or more identical to the amino acid sequence SEQ ID NO: 240, or an amino acid sequence which differs by no more than 1, 2, 5, 10, or 15 amino acid residues from the amino acid sequence of SEQ ID NO: 240.

[0441] In some embodiments, the anti-TCRβV antibody molecule, e.g., anti-TCRβ V12 antibody molecule comprises:

a VH domain comprising the amino acid sequence of SEQ ID NO: 3438, an amino acid sequence at least about 85%, 90%, 95%, 99% or more identical to the amino acid sequence SEQ ID NO: 3438, or an amino acid sequence which differs by no more than 1, 2, 5, 10, or 15 amino acid residues from the amino acid sequence of SEQ ID NO: 3438; and
a VL domain comprising the amino acid sequence of SEQ ID NO: 241, an amino acid sequence at least about 85%, 90%, 95%, 99% or more identical to the amino acid sequence SEQ ID NO: 241, or an amino acid sequence which differs by no more than 1, 2, 5, 10, or 15 amino acid residues from the amino acid sequence of SEQ ID NO: 241.

[0442] In some embodiments, the anti-TCRβV antibody molecule, e.g., anti-TCRβ V12 antibody molecule comprises:

a VH domain comprising the amino acid sequence of SEQ ID NO: 3438, an amino acid sequence at least about 85%, 90%, 95%, 99% or more identical to the amino acid sequence SEQ ID NO: 3438, or an amino acid sequence which differs by no more than 1, 2, 5, 10, or 15 amino acid residues from the amino acid sequence of SEQ ID NO: 3438; and
a VL domain comprising the amino acid sequence of SEQ ID NO: 242, an amino acid sequence at least about 85%, 90%, 95%, 99% or more identical to the amino acid sequence SEQ ID NO: 242, or an amino acid sequence which differs by no more than 1, 2, 5, 10, or 15 amino acid residues from the amino acid sequence of SEQ ID NO: 242.

[0443] In some embodiments, the anti-TCRβV antibody molecule, e.g., anti-TCRβ V12 antibody molecule comprises:

a VH domain comprising the amino acid sequence of SEQ ID NO: 309, an amino acid sequence at least about 85%, 90%, 95%, 99% or more identical to the amino acid sequence SEQ ID NO: 309, or an amino acid sequence which differs by no more than 1, 2, 5, 10, or 15 amino acid residues from the amino acid sequence of SEQ ID NO: 309; and
a VL domain comprising the amino acid sequence of SEQ ID NO: 238, an amino acid sequence at least about 85%, 90%, 95%, 99% or more identical to the amino acid sequence SEQ ID NO: 238, or an amino acid sequence which differs by no more than 1, 2, 5, 10, or 15 amino acid residues from the amino acid sequence of SEQ ID NO: 238.

[0444] In some embodiments, the anti-TCRβV antibody molecule, e.g., anti-TCRβ V12 antibody molecule comprises:

a VH domain comprising the amino acid sequence of SEQ ID NO: 309, an amino acid sequence at least about 85%, 90%, 95%, 99% or more identical to the amino acid sequence SEQ ID NO: 309, or an amino acid sequence which differs by no more than 1, 2, 5, 10, or 15 amino acid residues from the amino acid sequence of SEQ ID NO: 309; and
a VL domain comprising the amino acid sequence of SEQ ID NO: 239, an amino acid sequence at least about 85%, 90%, 95%, 99% or more identical to the amino acid sequence SEQ ID NO: 239, or an amino acid sequence which differs by no more than 1, 2, 5, 10, or 15 amino acid residues from the amino acid sequence of SEQ ID NO: 239.

[0445] In some embodiments, the anti-TCRβV antibody molecule, e.g., anti-TCRβ V12 antibody molecule comprises:

a VH domain comprising the amino acid sequence of SEQ ID NO: 309, an amino acid sequence at least about 85%, 90%, 95%, 99% or more identical to the amino acid sequence SEQ ID NO: 309, or an amino acid sequence which differs by no more than 1, 2, 5, 10, or 15 amino acid residues from the amino acid sequence of SEQ ID NO: 309; and
a VL domain comprising the amino acid sequence of SEQ ID NO: 240, an amino acid sequence at least about 85%, 90%, 95%, 99% or more identical to the amino acid sequence SEQ ID NO: 240, or an amino acid sequence which differs by no more than 1, 2, 5, 10, or 15 amino acid residues from the amino acid sequence of SEQ ID NO: 240.

[0446] In some embodiments, the anti-TCRβV antibody molecule, e.g., anti-TCRβ V12 antibody molecule comprises:

a VH domain comprising the amino acid sequence of SEQ ID NO: 309, an amino acid sequence at least about 85%, 90%, 95%, 99% or more identical to the amino acid sequence SEQ ID NO: 309, or an amino acid sequence which differs by no more than 1, 2, 5, 10, or 15 amino acid residues from the amino acid sequence of SEQ ID NO: 309; and
a VL domain comprising the amino acid sequence of SEQ ID NO: 241, an amino acid sequence at least about 85%, 90%, 95%, 99% or more identical to the amino acid sequence SEQ ID NO: 241, or an amino acid sequence which differs by no more than 1, 2, 5, 10, or 15 amino acid residues from the amino acid sequence of SEQ ID NO: 241.

[0447] In some embodiments, the anti-TCRβV antibody molecule, e.g., anti-TCRβ V12 antibody molecule comprises:

a VH domain comprising the amino acid sequence of SEQ ID NO: 309, an amino acid sequence at least about 85%, 90%, 95%, 99% or more identical to the amino acid sequence SEQ ID NO: 309, or an amino acid sequence which differs by no more than 1, 2, 5, 10, or 15 amino acid residues from the amino acid sequence of SEQ ID NO: 309; and
a VL domain comprising the amino acid sequence of SEQ ID NO: 242, an amino acid sequence at least about 85%, 90%, 95%, 99% or more identical to the amino acid sequence SEQ ID NO: 242, or an amino acid sequence which differs by no more than 1, 2, 5, 10, or 15 amino acid residues from the amino acid sequence of SEQ ID NO: 242.

[0448] In some embodiments, the anti-TCRβV antibody molecule, e.g., anti-TCRβ V12 antibody molecule is a full antibody or fragment thereof (e.g., a Fab, F(ab′)₂, Fv, or a single chain Fv fragment (scFv)). In embodiments, the anti-TCRβV antibody molecule, e.g., anti-TCRβ V6 (e.g., anti-TCRβ V6-5*01) antibody molecule is a monoclonal antibody or an antibody with single specificity. In some embodiments, the anti-TCRβV antibody molecule, e.g., anti-TCRβ V12 antibody molecule, can also be a humanized, chimeric, camelid, shark, or an in vitro-generated antibody molecule. In some embodiments, the anti-TCRβV antibody molecule, e.g., anti-TCRβ V12 antibody molecule is a humanized antibody molecule. The heavy and light chains of the anti-TCRβV antibody molecule, e.g., anti-TCRβ V12 antibody molecule can be full-length (e.g., an antibody can include at least one, and preferably two, complete heavy chains, and at least one, and preferably two, complete light chains) or can include an antigen-binding fragment (e.g., a Fab, F(ab′)₂, Fv, a single chain Fv fragment, a single domain antibody, a diabody (dAb), a bivalent antibody, or bispecific antibody or fragment thereof, a single domain variant thereof, or a camelid antibody).

[0449] In some embodiments, the anti-TCRβV antibody molecule, e.g., anti-TCRβ V12 antibody molecule is in the form of a multispecific molecule, e.g., a bispecific molecule, e.g., as described herein.

[0450] In some embodiments, the anti-TCRβV antibody molecule, e.g., anti-TCRβ V12 antibody molecule has a heavy chain constant region (Fc) chosen from, e.g., the heavy chain constant regions of IgG1, IgG2, IgG3, IgG4, IgM, IgA1, IgA2, IgD, and IgE. In some embodiments, the Fc region is chosen from the heavy chain constant regions of IgG1, IgG2, IgG3, and IgG4. In some embodiments, the Fc region is chosen from the heavy chain constant region of IgG1 or IgG2 (e.g., human IgG1, or IgG2). In some embodiments, the heavy chain constant region is human IgG1.

[0451] In some embodiments, the anti-TCRβV antibody molecule, e.g., anti-TCRβ V12 antibody molecule has a light chain constant region chosen from, e.g., the light chain constant regions of kappa or lambda, preferably kappa (e.g., human kappa). In one embodiment, the constant region is altered, e.g., mutated, to modify the properties of the anti-TCRβV antibody molecule, e.g., anti-TCRβ V12 antibody molecule (e.g., to increase or decrease one or more of: Fc receptor binding, antibody glycosylation, the number of cysteine residues, effector cell function, or complement function). For example, the constant region is mutated at positions 296 (M to Y), 298 (S to T), 300 (T to E), 477 (H to K) and 478 (N to F) to alter Fc receptor binding (e.g., the mutated positions correspond to positions 132 (M to Y), 134 (S to T), 136 (T to E), 313 (H to K) and 314 (N to F) of SEQ ID NOs: 212 or 214; or positions 135 (M to Y), 137 (S to T), 139 (T to E), 316 (H to K) and 317 (N to F) of SEQ ID NOs: 215, 216, 217 or 218).

[0452] Antibody B-H.1 comprises a first chain comprising the amino acid sequence of SEQ ID NO: 3280 and a second chain comprising the amino acid sequence of SEQ ID NO: 3281.

[0453] Additional exemplary anti-TCRβ V12 antibodies of the disclosure are provided in Table 2A. In some embodiments, the anti-TCRβ V12 is antibody B, e.g., humanized antibody B (antibody B-H), as provided in Table 2A. In some embodiments, the anti-TCRβV antibody comprises one or more (e.g., all three) of a LC CDR1, LC CDR2, and LC CDR3 provided in Table 2A; and/or one or more (e.g., all three) of a HC CDR1, HC CDR2, and HC CDR3 provided in Table 2A, or a sequence with at least 95% identity thereto. In some embodiments, antibody B comprises a variable heavy chain (VH) and/or a variable light chain (VL) provided in Table 2A, or a sequence with at least 95% identity thereto.

TABLE 2A
Amino acid and nucleotide sequences for murine and humanized antibody molecules which bind
to TCRVB 12, e.g., TCRVB 12-3 or TCRVB 12-4. The antibody molecules include murine mAb Antibody
B and humanized mAb Antibody B-H.1 to B-H.6. The amino acid the heavy and light chain CDRs, and the
amino acid and nucleotide sequences of the heavy and light chain variable regions, and the heavy and
light chains are shown.
Antibody B (murine), also referred to as 16G8

| | | |
|---|---|---|
| SEQ ID NO: 152 | HC CDR1 (Combined) | GFTFSNFGMH |
| SEQ ID NO: 226 | HC CDR2 (Combined) | YISSGSSTIYYADTLKG |
| SEQ ID NO: 234 | HC CDR3 (Combined) | RGEGAMDY |
| SEQ ID NO: 57 | HC CDR1 (Kabat) | NFGMH |
| SEQ ID NO: 58 | HC CDR2 (Kabat) | YISSGSSTIYYADTLKG |
| SEQ ID NO: 59 | HC CDR3 (Kabat) | RGEGAMDY |
| SEQ ID NO: 60 | HC CDR1 (Chothia) | GFTFSNF |
| SEQ ID NO: 256 | HC CDR2 (Chothia) | SSGSST |
| SEQ ID NO: 234 | HC CDR3 (Chothia) | RGEGAMDY |
| SEQ ID NO: 15 | VH | DVQLVESGGGLVQPGGSRKLSCAASGFTFSNFGMH |
| | | WVRQAPDKGLEWVAYISSGSSTIYYADTLKGRFTI |
| | | SRDNPKNTLFLQMTSLRSEDTAMYYCARRGEGAMD |
| | | YWGQGTSVTVSS |
| SEQ ID NO: 235 | LC CDR1 (Combined) | RASSSVNYIY |
| SEQ ID NO: 236 | LC CDR2 (Combined) | YTSNLAP |
| SEQ ID NO: 237 | LC CDR3 (Combined) | QQFTSSPFT |
| SEQ ID NO: 235 | LC CDR1 (Kabat) | RASSSVNYIY |
| SEQ ID NO: 64 | LC CDR2 (Kabat) | YTSNLAP |
| SEQ ID NO: 65 | LC CDR3 (Kabat) | QQFTSSPFT |
| SEQ ID NO: 66 | LC CDR1 (Chothia) | RASSSVNYIY |
| SEQ ID NO: 67 | LC CDR2 (Chothia) | YTSNLAP |
| SEQ ID NO: 68 | LC CDR3 (Chothia) | QQFTSSPFT |
| SEQ ID NO: 16 | VL | ENVLTQSPAIMSASLGEKVTMSCRASSSVNYIYWYQ |
| | | QKSDASPKLWIYYTSNLAPGVPTRFSGSGSGNSYSLT |
| | | ISSMEGEDAATYYCQQFTSSPFTFGSGTKLEIK |

Antibody B humanized (B-H)
Antibody B-H.1A HC-1

| | | |
|---|---|---|
| SEQ ID NO: 152 | HC CDR1 (Combined) | GFTFSNFGMH |
| SEQ ID NO: 226 | HC CDR2 (Combined) | YISSGSSTIYYADTLKG |
| SEQ ID NO: 234 | HC CDR3 (Combined) | RGEGAMDY |
| SEQ ID NO: | VH | EVQLVESGGGLVQPGGSLRLSCAASGFTFSNFGMHW |
| 3438 | | VRQAPGKGLEWVSYISSGSSTIYYADTLKGRFTISRD |
| | | NAKNSLYLQMNSLRAEDTAVYYCARRGEGAMDYW |
| | | GQGTTVTVSS |
| SEQ ID NO: 243 | DNA VH | GAGGTGCAGCTGGTTGAATCTGGCGGAGGATTGG |
| | | TTCAGCCTGGCGGCTCTCTGAGACTGTCTTGTGCC |
| | | GCTTCTGGCTTCACCTTCTCCAACTTCGGCATGCAC |
| | | TGGGTCCGACAGGCCCCTGGAAAAGGACTGGAAT |
| | | GGGTGTCCTACATCTCCTCCGGCTCCTCCACCATCT |
| | | ACTACGCTGACACCCTGAAGGGCAGATTCACCATC |
| | | TCTCGGGACAACGCCAAGAACTCCCTGTACCTGCA |
| | | GATGAACAGCCTGAGAGCCGAGGACACCGCCGTG |
| | | TACTACTGTGCTAGAAGAGGCGAGGGCGCCATGG |
| | | ATTATTGGGGCCAGGGAACCACAGTGACCGTGTCT |
| | | AGC |

Antibody B-H.1B HC-2

| | | |
|---|---|---|
| SEQ ID NO: 152 | HC CDR1 (Combined) | GFTFSNFGMH |
| SEQ ID NO: 226 | HC CDR2 (Combined) | YISSGSSTIYYADTLKG |
| SEQ ID NO: 234 | HC CDR3 (Combined) | RGEGAMDY |
| SEQ ID NO: 309 | VH | EVQLVESGGGLVQPGGSLRLSCAASGFTFSNFGMHW |
| | | VRQAPGKGLEWVSYISSGSSTIYYADTLKGRFTISRD |
| | | NSKNTLYLQMNSLRAEDTAVYYCARRGEGAMDYW |
| | | GQGTTVTVSS |
| SEQ ID NO: 244 | DNA VH | GAGGTGCAGCTGGTTGAATCTGGCGGAGGATTGG |
| | | TTCAGCCTGGCGGCTCTCTGAGACTGTCTTGTGCC |
| | | GCTTCTGGCTTCACCTTCTCCAACTTCGGCATGCAC |
| | | TGGGTCCGACAGGCCCCTGGAAAAGGACTGGAAT |
| | | GGGTGTCCTACATCTCCTCCGGCTCCTCCACCATCT |
| | | ACTACGCTGACACCCTGAAGGGCAGATTCACCATC |
| | | AGCCGGGACAACTCCAAGAACACCCTGTACCTGC |
| | | AGATGAACTCCCTGAGAGCCGAGGACACCGCCGT |
| | | GTACTACTGTGCTAGAAGAGGCGAGGGCGCCATG |
| | | GATTATTGGGGCCAGGGAACCACAGTGACCGTGT |
| | | CTAGC |

Antibody B-H.1C HC-3

| | | |
|---|---|---|
| SEQ ID NO: 152 | HC CDR1 (Combined) | GFTFSNFGMH |
| SEQ ID NO: 226 | HC CDR2 (Combined) | YISSGSSTIYYADTLKG |
| SEQ ID NO: 234 | HC CDR3 (Combined) | RGEGAMDY |
| SEQ ID NO: 308 | VH | QVQLVESGGGVVQPGRSLRLSCAASGFTFSNFGMH |
| | | WVRQAPGKGLEWVAYISSGSSTIYYADTLKGRFTISR |
| | | DNSKNTLYLQMNSLRAEDTAVYYCARRGEGAMDY |
| | | WGQGTTVTVSS |
| SEQ ID NO: 245 | DNA VH | CAGGTGCAGCTGGTGGAATCTGGTGGCGGAGTTGT |
| | | GCAGCCTGGCAGATCCCTGAGACTGTCTTGTGCCG |
| | | CCTCTGGCTTCACCTTCTCCAACTTCGGCATGCACT |
| | | GGGTCCGACAGGCCCCTGGAAAAGGATTGGAGTG |
| | | GGTCGCCTACATCTCCTCCGGCTCCTCCACCATCT |
| | | ACTACGCTGACACCCTGAAGGGCAGATTCACCATC |
| | | AGCCGGGACAACTCCAAGAACACCCTGTACCTGC |
| | | AGATGAACTCCCTGAGAGCCGAGGACACCGCCGT |
| | | GTACTACTGTGCTAGAAGAGGCGAGGGCGCCATG |
| | | GATTATTGGGGCCAGGGAACCACAGTGACCGTGT |
| | | CTAGC |

Antibody B-H.1D LC-1

| | | |
|---|---|---|
| SEQ ID NO: 235 | LC CDR1 (Combined) | RASSSVNYIY |
| SEQ ID NO: 236 | LC CDR2 (Combined) | YTSNLAP |
| SEQ ID NO: 237 | LC CDR3 (Combined) | QQFTSSPFT |
| SEQ ID NO: 238 | VL | DNQLTQSPSFLSASVGDRVTITCRASSSVNYIYWYQQ |
| | | KPGKAPKLLIYYTSNLAPGVPSRFSGSGSGNEYTLTIS |
| | | SLQPEDFATYYCQQFTSSPFTFGQGTKLEIK |
| SEQ ID NO: 246 | DNA VL | GATAACCAGCTGACCCAGTCTCCTAGCTTCCTGTC |
| | | TGCCTCTGTGGGCGACAGAGTGACAATTACCTGCC |
| | | GGGCCTCCTCCTCCGTGAACTACATCTACTGGTAT |
| | | CAGCAGAAGCCCGGCAAGGCCCCTAAGCTGCTGA |
| | | TCTACTACACCTCCAATCTGGCCCCTGGCGTGCCC |
| | | TCTAGATTTTCCGGATCTGGCTCCGGCAACGAGTA |
| | | TACCCTGACAATCTCCAGCCTGCAGCCTGAGGACT |
| | | TCGCCACCTACTACTGCCAGCAGTTCACCTCCTCT |
| | | CCATTCACCTTTGGCCAGGGCACCAAGCTGGAAAT |
| | | CAAA |

Antibody B-H.1E LC-2

| | | |
|---|---|---|
| SEQ ID NO: 235 | LC CDR1 (Combined) | RASSSVNYIY |
| SEQ ID NO: 236 | LC CDR2 (Combined) | YTSNLAP |
| SEQ ID NO: 237 | LC CDR3 (Combined) | QQFTSSPFT |
| SEQ ID NO: 239 | VL | DNQLTQSPSSLSASVGDRVTITCRASSSVNYIYWYQQ |
| | | KPGKAPKLLIYYTSNLAPGVPSRFSGSGSGNDYTLTI |
| | | SSLQPEDFATYYCQQFTSSPFTFGQGTKLEIK |
| SEQ ID NO: 247 | DNA VL | ATAACCAGCTGACCCAGTCTCCTTCCAGCCTGTCT |
| | | GCTTCTGTGGGCGACAGAGTGACAATTACCTGCCG |
| | | GGCCTCCTCCTCCGTGAACTACATCTACTGGTATC |
| | | AGCAGAAGCCCGGCAAGGCCCCTAAGCTGCTGAT |
| | | CTACTACACCTCCAATCTGGCCCCTGGCGTGCCCT |
| | | CTAGATTTTCCGGATCTGGCTCCGGCAACGACTAT |
| | | ACCCTGACAATCTCCAGCCTGCAGCCTGAGGACTT |
| | | CGCCACCTACTACTGCCAGCAGTTCACCTCCTCTC |
| | | CATTCACCTTTGGCCAGGGCACCAAGCTGGAAATC |
| | | AAA |

Antibody B-H.1F LC-3

| | | |
|---|---|---|
| SEQ ID NO: 235 | LC CDR1 (Combined) | RASSSVNYIY |
| SEQ ID NO: 236 | LC CDR2 (Combined) | YTSNLAP |
| SEQ ID NO: 237 | LC CDR3 (Combined) | QQFTSSPFT |
| SEQ ID NO: 240 | VL | ENVLTQSPATLSVSPGERATLSCRASSSVNYIYWYQQ |
| | | KPGQAPRLLIYYTSNLAPGIPARFSGSGSGNEYTLTI |
| | | SSLQSEDFAVYYCQQFTSSPFTFGQGTKLEIK |
| SEQ ID NO: 248 | DNA VL | GAGAATGTGCTGACCCAGTCTCCTGCCACACTGTC |
| | | TGTTAGCCCTGGCGAGAGAGCTACCCTGAGCTGCA |
| | | GAGCCTCTTCCTCCGTGAACTACATCTACTGGTAT |
| | | CAGCAGAAGCCCGGCCAGGCTCCTAGACTGCTGA |
| | | TCTACTACACCTCCAATCTGGCCCCTGGCATCCCT |
| | | GCCAGATTTTCCGGATCTGGCTCCGGCAACGAGTA |
| | | TACCCTGACCATCTCCAGCCTGCAGTCCGAGGACT |
| | | TTGCTGTGTACTATTGCCAGCAGTTCACAAGCAGC |
| | | CCTTTCACCTTTGGCCAGGGCACCAAGCTGGAAAT |
| | | CAAA |

Antibody B-H.1G LC-4

| | | |
|---|---|---|
| SEQ ID NO: 235 | LC CDR1 (Combined) | RASSSVNYIY |
| SEQ ID NO: 236 | LC CDR2 (Combined) | YTSNLAP |
| SEQ ID NO: 237 | LC CDR3 (Combined) | QQFTSSPFT |
| SEQ ID NO: 241 | VL | QNVLTQPPSASGTPGQRVTISCRASSSVNYIYWYQQL |
| | | PGTAPKLLIYYTSNLAPGVPDRFSGSGSGNSYSLAISG |
| | | LRSEDEADYYCQQFTSSPFTFGTGTKVTVL |
| SEQ ID NO: 249 | DNA VL | CAGAATGTGCTGACCCAACCTCCTTCCGCCTCTGG |
| | | CACACCTGGACAGAGAGTGACAATCTCCTGCCGG |
| | | GCCTCCTCCTCCGTGAACTACATCTACTGGTATCA |
| | | GCAGCTGCCCGGCACCGCTCCTAAACTGCTGATCT |
| | | ACTACACCTCCAATCTGGCCCCTGGCGTGCCCGAT |
| | | AGATTTTCCGGATCTGGCTCCGGCAACTCCTACAG |
| | | CCTGGCTATCTCTGGCCTGAGATCTGAGGACGAGG |
| | | CCGACTACTACTGCCAGCAGTTCACCTCCTCTCCA |
| | | TTCACCTTTGGCACCGGCACCAAAGTGACAGTTCT |
| | | T |

Antibody B-H.1H LC-5

| | | |
|---|---|---|
| SEQ ID NO: 235 | LC CDR1 (Combined) | RASSSVNYIY |
| SEQ ID NO: 236 | LC CDR2 (Combined) | YTSNLAP |
| SEQ ID NO: 237 | LC CDR3 (Combined) | QQFTSSPFT |
| SEQ ID NO: 242 | VL | SNELTQPPSVSVSPGQTARITCRASSSVNYIYWYQQK |
| | | SGQAPVLVIYYTSNLAPGIPERFSGSGSGNMYTLTISG |
| | | AQVEDEADYYCQQFTSSPFTFGTGTKVTVL |
| SEQ ID NO: 250 | DNA VL | TCTAATGAGCTGACCCAGCCTCCTTCCGTGTCCGT |
| | | GTCTCCTGGACAGACCGCCAGAATTACCTGCCGGG |
| | | CCTCCTCCTCCGTGAACTACATCTACTGGTATCAG |
| | | CAGAAGTCCGGCCAGGCTCCTGTGCTCGTGATCTA |
| | | CTACACCTCCAATCTGGCCCCTGGCATCCCTGAGA |
| | | GATTCTCCGGATCTGGCTCCGGCAACATGTACACC |
| | | CTGACCATCTCTGGCGCCCAGGTGGAAGATGAGG |
| | | CCGACTACTACTGCCAGCAGTTCACCTCCTCTCCA |
| | | TTCACCTTTGGCACCGGCACCAAAGTGACAGTTCT |
| | | T |

Antibody B-H.1

| | | |
|---|---|---|
| SEQ ID NO: | Chain 1: Fc only | METDTLLLWVLLLWVPGSTGDKTHTCPPCPAPELLG |
| 3280 | | GPSVFLFPPKPKDTLMISRTPEVTCVVVDVSHEDPEV |
| | | KFNWYVDGVEVHNAKTKPREEQYNSTYRVVSVLTV |
| | | LHQDWLNGKEYKCKVSNKALPAPIEKTISKAKGQPR |
| | | EPQVYTLPPCREEMTKNQVSLWCLVKGFYPSDIAVE |
| | | WESNGQPENNYKTTPPVLDSDGSFFLYSKLTVDKSR |
| | | WQQGNVFSCSVMHEALHNRFTQKSLSLSPGK |
| SEQ ID NO: | Chain2: humanized B- | METDTLLLWVLLLWVPGSTGEVQLVESGGGLVQPG |
| 3281 | H scFv | GSLRLSCAASGFTFSNFGMHWVRQAPGKGLEWVSYI |
| | | SSGSSTIYYADTLKGRFTISRDNSKNTLYLQMNSLRA |
| | | EDTAVYYCARRGEGAMDYWGQGTTVTVSSGGGGS |
| | | GGGGSGGGGSGGGGSDNQLTQSPSFLSASVGDRVTI |
| | | TCRASSSVNYIYWYQQKPGKAPKLLIYYTSNLAPGV |
| | | PSRFSGSGSGNEYTLTISSLQPEDFATYYCQQFTSSPF |
| | | TFGQGTKLEIKGGGGSDKTHTCPPCPAPELLGGPSVF |
| | | LFPPKPKDTLMISRTPEVTCVVVDVSHEDPEVKFNW |
| | | YVDGVEVHNAKTKPREEQYNSTYRVVSVLTVLHQD |
| | | WLNGKEYKCKVSNKALPAPIEKTISKAKGQPREPQV |
| | | CTLPPSREEMTKNQVSLSCAVKGFYPSDIAVEWESN |
| | | GQPENNYKTTPPVLDSDGSFFLVSKLTVDKSRWQQG |
| | | NVFSCSVMHEALHNHYTQKSLSLSPGKGGGGSGGG |
| | | GSGLNDIFEAQKIEWHE |
| SEQ ID NO: 266 | scFv | EVQLVESGGGLVQPGGSLRLSCAASGFTFSNFGMHW |
| | | VRQAPGKGLEWVSYISSGSSTIYYADTLKGRFTISRD |
| | | NSKNTLYLQMNSLRAEDTAVYYCARRGEGAMDYW |
| | | GQGTTVTVSSGGGGSGGGGSGGGGSGGGGSDNQLT |
| | | QSPSFLSASVGDRVTITCRASSSVNYIYWYQQKPGKA |
| | | PKLLIYYTSNLAPGVPSRFSGSGSGNEYTLTISSLQPE |
| | | DFATYYCQQFTSSPFTFGQGTKLEIK |

Antibody B-H.2

| | | |
|---|---|---|
| SEQ ID NO: | scFv | EVQLVESGGGLVQPGGSLRLSCAASGFTFSNFGMHW |
| 1338 | | VRQAPGKGLEWVSYISSGSSTIYYADTLKGRFTISRD |
| | | NSKNTLYLQMNSLRAEDTAVYYCARRGEGAMDYW |
| | | GQGTTVTVSSGGGGSGGGGSGGGGSGGGGSDNQLT |
| | | QSPSSLSASVGDRVTITCRASSSVNYIYWYQQKPGKA |
| | | PKLLIYYTSNLAPGVPSRFSGSGSGNDYTLTISSLQPE |
| | | DFATYYCQQFTSSPFTFGQGTKLEIK |

Antibody B-H.3

| | | |
|---|---|---|
| SEQ ID NO: | scFv | EVQLVESGGGLVQPGGSLRLSCAASGFTFSNFGMHW |
| 1339 | | VRQAPGKGLEWVSYISSGSSTIYYADTLKGRFTISRD |
| | | NSKNTLYLQMNSLRAEDTAVYYCARRGEGAMDYW |
| | | GQGTTVTVSSGGGGSGGGGSGGGGSGGGGSSNELT |
| | | QPPSVSVSPGQTARITCRASSSVNYIYWYQQKSGQAP |
| | | VLVIYYTSNLAPGIPERFSGSGSGNMYTLTISGAQVE |
| | | DEADYYCQQFTSSPFTFGTGTKVTVL |

Antibody B-H.4

| | | |
|---|---|---|
| SEQ ID NO: | scFv | QVQLVESGGGVVQPGRSLRLSCAASGFTFSNFGMH |
| 1340 | | WVRQAPGKGLEWVAYISSGSSTIYYADTLKGRFTISR |
| | | DNSKNTLYLQMNSLRAEDTAVYYCARRGEGAMDY |
| | | WGQGTTVTVSSGGGGSGGGGSGGGGSGGGGSDNQ |
| | | LTQSPSFLSASVGDRVTITCRASSSVNYIYWYQQKPG |
| | | KAPKLLIYYTSNLAPGVPSRFSGSGSGNEYTLTISSLQ |
| | | PEDFATYYCQQFTSSPFTFGQGTKLEIK |

Antibody B-H.5

| | | |
|---|---|---|
| SEQ ID NO: | scFv | QVQLVESGGGVVQPGRSLRLSCAASGFTFSNFGMH |
| 1341 | | WVRQAPGKGLEWVAYISSGSSTIYYADTLKGRFTISR |
| | | DNSKNTLYLQMNSLRAEDTAVYYCARRGEGAMDY |
| | | WGQGTTVTVSSGGGGSGGGGSGGGGSGGGGSDNQ |
| | | LTQSPSSLSASVGDRVTITCRASSSVNYIYWYQQKPG |
| | | KAPKLLIYYTSNLAPGVPSRFSGSGSGNDYTLTISSLQ |
| | | PEDFATYYCQQFTSSPFTFGQGTKLEIK |

Antibody B-H.6

| | | |
|---|---|---|
| SEQ ID NO: | scFv | QVQLVESGGGVVQPGRSLRLSCAASGFTFSNFGMH |
| 1342 | | WVRQAPGKGLEWVAYISSGSSTIYYADTLKGRFTISR |
| | | DNSKNTLYLQMNSLRAEDTAVYYCARRGEGAMDY |
| | | WGQGTTVTVSSGGGGSGGGGSGGGGSGGGGSSNEL |
| | | TQPPSVSVSPGQTARITCRASSSVNYIYWYQQKSGQA |
| | | PVLVIYYTSNLAPGIPERFSGSGSGNMYTLTISGAQVE |
| | | DEADYYCQQFTSSPFTFGTGTKVTVL |

TABLE 3A
Constant region amino acid sequences of human IgG heavy chains and human kappa light chain

| Human kappa | LC | RTVAAPSVFI FPPSDEQLKS GTASVVCLLN NFYPREAKVQ |
|---|---|---|
| constant | | WKVDNALQSG NSQESVTEQD SKDSTYSLSS TLTLSKADYE |
| region | | KHKVYACEVT HQGLSSPVTK SFNRGEC |
| SEQ ID NO: | | |
| 251 | | |
| IgG4 (S228P) | HC | ASTKGPSVFPLAPCSRSTSESTAALGCLVKDYFPEPVTVSWNSGALTSGVH |
| mutant | | TFPAVLQSSGLYSLSSVVTVPSSSLGTKTYTCNVDHKPSNTKVDKRVESK |
| constant | | YGPPCPPCPAPEFLGGPSVFLFPPKPKDTLMISRTPEVTCVVVDVSQEDPEV |
| region (EU | | QFNWYVDGVEVHNAKTKPREEQFNSTYRVVSVLTVLHQDWLNGKEYKC |
| Numbering) | | KVSNKGLPSSIEKTISKAKGQPREPQVYTLPPSQEEMTKNQVSLTCLVKGF |
| SEQ ID NO: | | YPSDIAVEWESNGQPENNYKTTPPVLDSDGSFFLYSRLTVDKSRWQEGNV |
| 40 | | FSCSVMHEALHNHYTQKSLSLSLG |
| IgG1 wild type | HC | ASTKGPSVFPLAPSSKSTSGGTAALGCLVKDYFPEPVTVSWNSGALTSGV |
| SEQ ID NO: | | HTFPAVLQSSGLYSLSSVVTVPSSSLGTQTYICNVNHKPSNTKVDKRVEPK |
| 41 | | SCDKTHTCPPCPAPELLGGPSVFLFPPKPKDTLMISRTPEVTCVVVDVSHE |
| | | DPEVKFNWYVDGVEVHNAKTKPREEQYNSTYRVVSVLTVLHQDWLNG |
| | | KEYKCKVSNKALPAPIEKTISKAKGQPREPQVYTLPPSREEMTKNQVSLTC |
| | | LVKGFYPSDIAVEWESNGQPENNYKTTPPVLDSDGSFFLYSKLTVDKSRW |
| | | QQGNVFSCSVMHEALHNHYTQKSLSLSPGK |
| IgG1 (N297A) | HC | ASTKGPSVFPLAPSSKSTSGGTAALGCLVKDYFPEPVTVSWNSGALTSGV |
| mutant | | HTFPAVLQSSGLYSLSSVVTVPSSSLGTQTYICNVNHKPSNTKVDKRVEPK |
| constant | | SCDKTHTCPPCPAPELLGGPSVFLFPPKPKDTLMISRTPEVTCVVVDVSHE |
| region (EU | | DPEVKFNWYVDGVEVHNAKTKPREEQYASTYRVVSVLTVLHQDWLNG |
| Numbering) | | KEYKCKVSNKALPAPIEKTISKAKGQPREPQVYTLPPSREEMTKNQVSLTC |
| SEQ ID NO: | | LVKGFYPSDIAVEWESNGQPENNYKTTPPVLDSDGSFFLYSKLTVDKSRW |
| 252 | | QQGNVFSCSVMHEALHNHYTQKSLSLSPGK |
| IgM constant | HC | GSASAPTLFPLVSCENSPSDTSSVAVGCLAQDFLPDSITFSWKYKNNSDISS |
| delta CDC | | TRGFPSVLRGGKYAATSQVLLPSKDVMQGTDEHVVCKVQHPNGNKEKN |
| (P311A, | | VPLPVIAELPPKVSVFVPPRDGFFGNPRKSKLICQATGFSPRQIQVSWLREG |
| P313S) | | KQVGSGVTTDQVQAEAKESGPTTYKVTSTLTIKESDWLGQSMFTCRVDH |
| SEQ ID NO: | | RGLTFQQNASSMCVPDQDTAIRVFAIPPSFASIFLTKSTKLTCLVTDLTTYD |
| 73 | | SVTISWTRQNGEAVKTHTNISESHPNATFSAVGEASICEDDWNSGERFTCT |
| | | VTHTDLASSLKQTISRPKGVALHRPDVYLLPPAREQLNLRESATITCLVTG |
| | | FSPADVFVQWMQRGQPLSPEKYVTSAPMPEPQAPGRYFAHSILTVSEEEW |
| | | NTGETYTCVVAHEALPNRVTERTVDKSTGKPTLYNVSLVMSDTAGTCY |
| IgGAl | HC | ASPTSPKVFPLSLCSTQPDGNVVIACLVQGFFPQEPLSVTWSESGQGVTAR |
| SEQ ID NO: | | NFPPSQDASGDLYTTSSQLTLPATQCLAGKSVTCHVKHYTNPSQDVTVPC |
| 74 | | PVPSTPPTPSPSTPPTPSPSCCHPRLSLHRPALEDLLLGSEANLTCTLTGLRD |
| | | ASGVTFTWTPSSGKSAVQGPPERDLCGCYSVSSVLPGCAEPWNHGKTFTC |
| | | TAAYPESKTPLTATLSKSGNTFRPEVHLLPPPSEELALNELVTLTCLARGFS |
| | | PKDVLVRWLQGSQELPREKYLTWASRQEPSQGTTTFAVTSILRVAAEDW |
| | | KKGDTFSCMVGHEALPLAFTQKTIDRLAGKPTHVNVSVVMAEVDGTCY |
| IgGA2 | HC | ASPTSPKVFPLSLDSTPQDGNVVVACLVQGFFPQEPLSVTWSESGQNVTA |
| SEQ ID NO: | | RNFPPSQDASGDLYTTSSQLTLPATQCPDGKSVTCHVKHYTNSSQDVTVP |
| 257 | | CRVPPPPPCCHPRLSLHRPALEDLLLGSEANLTCTLTGLRDASGATFTWTP |
| | | SSGKSAVQGPPERDLCGCYSVSSVLPGCAQPWNHGETFTCTAAHPELKTP |
| | | LTANITKSGNTFRPEVHLLPPPSEELALNELVTLTCLARGFSPKDVLVRWL |
| | | QGSQELPREKYLTWASRQEPSQGTTTYAVTSILRVAAEDWKKGETFSCM |
| | | VGHEALPLAFTQKTIDRMAGKPTHINVSVVMAEADGTCY |
| Human Ig_J | HC | MKNHLLFWGVLAVFIKAVHVKAQEDERIVLVDNKCKCARITSRIIRSSED |
| chain | | PNEDIVERNIRIIVPLNNRENISDPTSPLRTRFVYHLSDLCKKCDPTEVELDN |
| SEQ ID NO: | | QIVTATQSNICDEDSATETCYTYDRNKCYTAVVPLVYGGETKMVETALTP |
| 258 | | DACYPD |

### Anti-TCRβ V5 Antibodies

[0454] Accordingly, in one aspect, the disclosure provides an anti-TCRβV antibody molecule that binds to human TCRβ V5. In some embodiments, the TCRβ V5 subfamily comprises TCRβ V5-5*01, TCRβ V5-6*01, TCRβ V5-4*01, TCRβ V5-8*01, TCRβ V5-1*01, or a variant thereof.

[0455] Exemplary anti-TCRβ V5 antibodies of the disclosure are provided in Table 10A. In some embodiments, the anti-TCRβ3 V5 is antibody C, e.g., humanized antibody C (antibody C-H), as provided in Table 10A. In some embodiments, the anti-TCRβV antibody comprises one or more (e.g., all three) of a LC CDR1, LC CDR2, and LC CDR3 provided in Table 10A; and/or one or more (e.g., all three) of a HC CDR1, HC CDR2, and HC CDR3 provided in Table 10A, or a sequence with at least 95% identity thereto. In some embodiments, antibody C comprises a variable heavy chain (VH) and/or a variable light chain (VL) provided in Table 10A, or a sequence with at least 95% identity thereto.

TABLE 10A
Amino acid sequences for anti TCRβ V5 antibodies
Amino acid and nucleotide sequences for murine and humanized antibody molecules which bind to TCRVB
5 (e.g., TCRVB 5-5 or TCRVB 5-6). The amino acid the heavy and light chain CDRs, and the amino acid
and nucleotide sequences of the heavy and light chain variable regions, and the heavy and light chains
are shown.
Murine antibody C, also referred to as 4H1

| | | |
|---|---|---|
| SEQ ID NO: 1315 | HC CDR1 (Kabat) | AYGVN |
| SEQ ID NO: 1316 | HC CDR2 (Kabat) | MIWGDGNTDYNSALKS |
| SEQ ID NO: 1317 | HC CDR3 (Kabat) | DRVTATLYAMDY |
| SEQ ID NO: 1318 | HC CDR1 (Chothia) | GFSLTAY |
| SEQ ID NO: 1319 | HC CDR2 (Chothia) | WGDGN |
| SEQ ID NO: 1317 | HC CDR3 (Chothia) | DRVTATLYAMDY |
| SEQ ID NO: 1320 | HC CDR1 (Combined) | GFSLTAYGVN |
| SEQ ID NO: 1316 | HC CDR2 (Combined) | MIWGDGNTDYNSALKS |
| SEQ ID NO: 1317 | HC CDR3 (Combined) | DRVTATLYAMDY |
| SEQ ID NO: 1321 | LC CDR1 (Kabat) | SASQGISNYLN |
| SEQ ID NO: 1322 | LC CDR2 (Kabat) | YTSSLHS |
| SEQ ID NO: 1323 | LC CDR3 (Kabat) | QQYSKLPRT |
| SEQ ID NO: 1321 | LC CDR1 (Chothia) | SASQGISNYLN |
| SEQ ID NO: 1322 | LC CDR2 (Chothia) | YTSSLHS |
| SEQ ID NO: 1323 | LC CDR3 (Chothia) | QQYSKLPRT |
| SEQ ID NO: 1321 | LC CDR1 (Combined) | SASQGISNYLN |
| SEQ ID NO: 1322 | LC CDR2 (Combined) | YTSSLHS |
| SEQ ID NO: 1323 | LC CDR3 (Combined) | QQYSKLPRT |
| SEQ ID NO: 261 | VH | DIQMTQTTSSLSASLGDRVTISCSASQGISNYLNWY |
| | | QQKPDGTVKLLIYYTSSLHSGVPSRFSGSGSGTDYS |
| | | LTISNLEPEDIATYYCQQYSKLPRTFGGGTKVEIK |
| SEQ ID NO: 262 | VL | QVQLKESGPGLVAPSQSLSITCTVSGFSLTAYGVNW |
| | | VRQPPGKGLEWLGMIWGDGNTDYNSALKSRLSISK |
| | | DNSKSQVFLKMNSLQTDDTARYYCARDRVTATLY |
| | | AMDYWGQGTSVTVSS |

Humanized antibody C
C-H-1 antibody

| | | |
|---|---|---|
| SEQ ID NO: 1315 | HC CDR1 (Kabat) | AYGVN |
| SEQ ID NO: 1316 | HC CDR2 (Kabat) | MIWGDGNTDYNSALKS |
| SEQ ID NO: 1317 | HC CDR3 (Kabat) | DRVTATLYAMDY |
| SEQ ID NO: 1318 | HC CDR1 (Chothia) | GFSLTAY |
| SEQ ID NO: 1319 | HC CDR2 (Chothia) | WGDGN |
| SEQ ID NO: 1317 | HC CDR3 (Chothia) | DRVTATLYAMDY |
| SEQ ID NO: 1320 | HC CDR1 (Combined) | GFSLTAYGVN |
| SEQ ID NO: 1316 | HC CDR2 (Combined) | MIWGDGNTDYNSALKS |
| SEQ ID NO: 1317 | HC CDR3 (Combined) | DRVTATLYAMDY |
| SEQ ID NO: 1321 | LC CDR1 (Kabat) | SASQGISNYLN |
| SEQ ID NO: 1322 | LC CDR2 (Kabat) | YTSSLHS |
| SEQ ID NO: 1323 | LC CDR3 (Kabat) | QQYSKLPRT |
| SEQ ID NO: 1321 | LC CDR1 (Chothia) | SASQGISNYLN |
| SEQ ID NO: 1322 | LC CDR2 (Chothia) | YTSSLHS |
| SEQ ID NO: 1323 | LC CDR3 (Chothia) | QQYSKLPRT |
| SEQ ID NO: 1321 | LC CDR1 (Combined) | SASQGISNYLN |
| SEQ ID NO: 1322 | LC CDR2 (Combined) | YTSSLHS |
| SEQ ID NO: 1323 | LC CDR3 (Combined) | QQYSKLPRT |

| | | |
|---|---|---|
| SEQ ID NO: 1324 | VL | |
| | | QTPGKAPKLLIYYTSSLHSGVPSRFSGSGSGTDYTFTI |
| | | SSLQPEDIATYYCQQYSKLPRTFGQGTKLQIT |
| SEQ ID NO: 1325 | VH | QVQLQESGPGLVRPSQTLSLTCTVSGFSLTAYGVN |
| | | WVRQPPGRGLEWLGMIWGDGNTDYNSALKSRVT |
| | | MLKDTSKNQFSLRLSSVTAADTAVYYCARDRVTAT |
| | | LYAMDYW GQGSLVTVSS |

Humanized antibody C Variable light chain (VL)

| SEQ ID | VL | C-H-VL.1 | |
|---|---|---|---|
| NO: 3000 | | | LLIYYTSSLHSGVPSRFSGSGSGTEYTLTISSLQPEDFATYYCQQYS |
| | | | KLPRTFGGGTKVEIK |
| SEQ ID | VL | C-H-VL.2 | DIQMTQSPSSLSASVGDRVTITCSASQGISNYLNWYQQKPGKAVK |
| NO: 3001 | | | LLIYYTSSLHSGVPSRFSGSGSGTDYTLTISSLQPEDFATYYCQQYS |
| | | | KLPRTFGGGTKVEIK |
| SEQ ID | VL | C-H-VL.3 | DIQMTQSPSSLSASVGDRVTITCSASQGISNYLNWYQQKPGKVVK |
| NO: 3002 | | | LLIYYTSSLHSGVPSRFSGSGSGTDYTLTISSLQPEDVATYYCQQYS |
| | | | KLPRTFGGGTKVEIK |
| SEQ ID | VL | C-H-VL.4 | DIQMTQSPSSLSASVGDRVTITCSASQGISNYLNWYQQKPGQAVK |
| NO: 3003 | | | LLIYYTSSLHSGVPSRFSGSGSGTDYTLTISSLQPEDVATYYCQQYS |
| | | | KLPRTFGGGTKVEIK |
| SEQ ID | VL | C-H-VL.5 | DIQMTQSPSSLSASVGDRVTITCSASQGISNYLNWYQQKPGKAVK |
| NO: 3004 | | | LLIYYTSSLHSGVPSRFSGSGSGTDYTFTISSLQPEDIATYYCQQYS |
| | | | KLPRTFGGGTKVEIK |
| SEQ ID | VL | C-H-VL.6 | DIQMTQSPSSLSASVGDRVTITCSASQGISNYLNWYQQKPGKTVK |
| NO: 3005 | | | LLIYYTSSLHSGIPSRFSGSGSGTDYTLTIRSLQPEDFATYYCQQYS |
| | | | KLPRTFGGGTKVEIK |
| SEQ ID | VL | C-H-VL.7 | AIQMTQSPSSLSASVGDRVTITCSASQGISNYLNWYQQKPGKAVK |
| NO: 3006 | | | LLIYYTSSLHSGVPSRFSGSGSGTDYTLTISSLQPEDFATYYCQQYS |
| | | | KLPRTFGGGTKVEIK |
| SEQ ID | VL | C-H-VL.8 | DIQMTQSPSSVSASVGDRVTITCSASQGISNYLNWYQQKPGKAVK |
| NO: 3007 | | | LLIYYTSSLHSGVPSRFSGSGSGTDYTLTISSLQPEDFATYYCQQYS |
| | | | KLPRTFGGGTKVEIK |
| SEQ ID | VL | C-H-VL.9 | DIQMTQSPSSLSASVGDRVTITCSASQGISNYLNWYQQKPGKAVK |
| NO: 3008 | | | RLIYYTSSLHSGVPSRFSGSGSGTEYTLTISNLQPEDFATYYCQQYS |
| | | | KLPRTFGGGTKVEIK |
| SEQ ID | VL | C-H- | AIRMTQSPFSLSASVGDRVTITCSASQGISNYLNWYQQKPAKAVK |
| NO: 3009 | | VL.10 | LFIYYTSSLHSGVPSRFSGSGSGTDYTLTISSLQPEDFATYYCQQYS |
| | | | KLPRTFGGGTKVEIK |
| SEQ ID | VL | C-H- | DIQMTQSPSSLSASVGDRVTITCSASQGISNYLNWYQQKPGKAVK |
| NO: 3010 | | VL.11 | RLIYYTSSLHSGVPSRFSGSGSGTEYTLTISSLQPEDFATYYCQQYS |
| | | | KLPRTFGGGTKVEIK |
| SEQ ID | VL | C-H- | DIQMTQSPSTLSASVGDRVTITCSASQGISNYLNWYQQKPGKAVK |
| NO: 3011 | | VL.12 | LLIYYTSSLHSGVPSRFSGSGSGTEYTLTISSLQPDDFATYYCQQYS |
| | | | KLPRTFGGGTKVEIK |
| SEQ ID | VL | C-H- | DIQMTQSPSSLSASVGDRVTITCSASQGISNYLNWYQQKPGKAVK |
| NO:3012 | | VL.13 | SLIYYTSSLHSGVPSRFSGSGSGTDYTLTISSLQPEDFATYYCQQYS |
| | | | KLPRTFGGGTKVEIK |
| SEQ ID | VL | C-H- | DIQMTQSPSSLSASVGDRVTITCSASQGISNYLNWYQQKPGKAVK |
| NO: 3013 | | VL.14 | SLIYYTSSLHSGVPSKFSGSGSGTDYTLTISSLQPEDFATYYCQQYS |
| | | | KLPRTFGGGTKVEIK |
| SEQ ID | VL | C-H- | DIQMTQSPSSLSASVGDRVTITCSASQGISNYLNWYQQKPEKAVK |
| NO: 3014 | | VL.15 | SLIYYTSSLHSGVPSRFSGSGSGTDYTLTISSLQPEDFATYYCQQYS |
| | | | KLPRTFGGGTKVEIK |
| SEQ ID | VL | C-H- | DIQMTQSPSAMSASVGDRVTITCSASQGISNYLNWYQQKPGKVV |
| NO: 3015 | | VL.16 | KRLIYYTSSLHSGVPSRFSGSGSGTEYTLTISSLQPEDFATYYCQQY |
| | | | SKLPRTFGGGTKVEIK |
| SEQ ID | VL | C-H- | DIVMTQSPDSLAVSLGERATINCSASQGISNYLNWYQQKPGQPVK |
| NO: 3016 | | VL.17 | LLIYYTSSLHSGVPDRFSGSGSGTDYTLTISSLQAEDVAVYYCQQY |
| | | | SKLPRTFGGGTKVEIK |
| SEQ ID | VL | C-H- | EIVMTQSPGTLSLSPGERATLSCSASQGISNYLNWYQQKPGQAVK |
| NO: 3017 | | VL.18 | LLIYYTSSLHSGIPDRFSGSGSGTDYTLTISRLEPEDFAVYYCQQYS |
| | | | KLPRTFGGGTKVEIK |
| SEQ ID | VL | C-H- | EIVMTQSPPTLSLSPGERVTLSCSASQGISNYLNWYQQKPGQAVK |
| NO: 3018 | | VL.19 | LLIYYTSSLHSGIPARFSGSGSGTDYTLTISSLQPEDFAVYYCQQYS |
| | | | KLPRTFGGGTKVEIK |
| SEQ ID | VL | C-H- | EIVMTQSPPTLSLSPGERVTLSCSASQGISNYLNWYQQKPGQAVK |
| NO: 3019 | | VL.20 | LLIYYTSSLHSSIPARFSGSGSGTDYTLTISSLQPEDFAVYYCQQYS |
| | | | KLPRTFGGGTKVEIK |
| SEQ ID | VL | C-H- | EIVMTQSPATLSLSPGERATLSCSASQGISNYLNWYQQKPGQAVK |
| NO: 3020 | | VL.21 | LLIYYTSSLHSGIPARFSGSGSGTDYTLTISSLEPEDFAVYYCQQYS |
| | | | KLPRTFGGGTKVEIK |
| SEQ ID | VL | C-H- | EIVMTQSPATLSLSPGERATLSCSASQGISNYLNWYQQKPGQAVK |
| NO: 3021 | | VL.22 | LLIYYTSSLHSGIPARFSGSGSGTDYTLTISRLEPEDFAVYYCQQYS |
| | | | KLPRTFGGGTKVEIK |
| SEQ ID | VL | C-H- | EIVMTQSPATLSLSPGERATLSCSASQGISNYLNWYQQKPGQAVK |
| NO: 3022 | | VL.23 | LLIYYTSSLHSGIPDRFSGSGSGTDYTLTISRLEPEDFAVYYCQQYS |
| | | | KLPRTFGGGTKVEIK |
| SEQ ID | VL | C-H- | EIVMTQSPATLSLSPGERATLSCSASQGISNYLNWYQQKPGLAVK |
| NO: 3023 | | VL.24 | LLIYYTSSLHSGIPDRFSGSGSGTDYTLTISRLEPEDFAVYYCQQYS |
| | | | KLPRTFGGGTKVEIK |
| SEQ ID | VL | C-H- | DIQMIQSPSFLSASVGDRVSIICSASQGISNYLNWYLQKPGKSVKLF |
| NO: 3024 | | VL.25 | IYYTSSLHSGVSSRFSGRGSGTDYTLTIISLKPEDFAAYYCQQYSKL |
| | | | PRTFGGGTKVEIK |
| SEQ ID | VL | C-H- | EIVMTQSPATLSLSPGERATLSCSASQGISNYLNWYQQKPGQAVK |
| NO: 3025 | | VL.26 | LLIYYTSSLHSGIPARFSGSGSGTDYTLTISSLQPEDFAVYYCQQYS |
| | | | KLPRTFGGGTKVEIK |
| SEQ ID | VL | C-H- | EIVMTQSPATLSLSPGERATLSCSASQGISNYLNWYQQKPGQAVK |
| NO: 3026 | | VL.27 | LLIYYTSSLHSGIPARFSGSGPGTDYTLTISSLEPEDFAVYYCQQYS |
| | | | KLPRTFGGGTKVEIK |
| SEQ ID | VL | C-H- | DIVMTQTPLSLSVTPGQPASISCSASQGISNYLNWYLQKPGQSVKL |
| NO: 3027 | | VL.28 | LIYYTSSLHSGVPDRFSGSGSGTDYTLKISRVEAEDVGVYYCQQYS |
| | | | KLPRTFGGGTKVEIK |
| SEQ ID | VL | C-H- | DIVMTQTPLSLSVTPGQPASISCSASQGISNYLNWYLQKPGQPVKL |
| NO: 3028 | | VL.29 | LIYYTSSLHSGVPDRFSGSGSGTDYTLKISRVEAEDVGVYYCQQYS |
| | | | KLPRTFGGGTKVEIK |
| SEQ ID | VL | C-H- | DIVMTQSPAFLSVTPGEKVTITCSASQGISNYLNWYQQKPDQAVK |
| NO: 3029 | | VL.30 | LLIYYTSSLHSGVPSRFSGSGSGTDYTFTISSLEAEDAATYYCQQYS |
| | | | KLPRTFGGGTKVEIK |
| SEQ ID | VL | C-H- | DIVMTQSPLSLPVTPGEPASISCSASQGISNYLNWYLQKPGQSVKL |
| NO: 3030 | | VL.31 | LIYYTSSLHSGVPDRFSGSGSGTDYTLKISRVEAEDVGVYYCQQYS |
| | | | KLPRTFGGGTKVEIK |
| SEQ ID | VL | C-H- | DIVMTQTPLSLPVTPGEPASISCSASQGISNYLNWYLQKPGQSVKL |
| NO: 3031 | | VL.32 | LIYYTSSLHSGVPDRFSGSGSGTDYTLKISRVEAEDVGVYYCQQYS |
| | | | KLPRTFGGGTKVEIK |
| SEQ ID | VL | C-H- | EIVMTQSPATLSVSPGERATLSCSASQGISNYLNWYQQKPGQAVK |
| NO: 3032 | | VL.33 | LLIYYTSSLHSGIPARFSGSGSGTEYTLTISILQSEDFAVYYCQQYS |
| | | | KLPRTFGGGTKVEIK |
| SEQ ID | VL | C-H- | EIVMTQSPATLSVSPGERATLSCSASQGISNYLNWYQQKPGQAVK |
| NO: 3033 | | VL.34 | LLIYYTSSLHSGIPARFSGSGSGTEYTLTISSLQSEDFAVYYCQQYS |
| | | | KLPRTFGGGTKVEIK |
| SEQ ID | VL | C-H- | DIVMTQSPLSLPVTLGQPASISCSASQGISNYLNWYQQRPGQSVKR |
| NO: 3034 | | VL.35 | LIYYTSSLHSGVPDRFSGSGSGTDYTLKISRVEAEDVGVYYCQQYS |
| | | | KLPRTFGGGTKVEIK |
| SEQ ID | VL | C-H- | EITMTQSPAFMSATPGDKVNISCSASQGISNYLNWYQQKPGEAVK |
| NO: 3035 | | VL.36 | FIIYYTSSLHSGIPPRFSGSGYGTDYTLTINNIESEDAAYYYCQQYS |
| | | | KLPRTFGGGTKVEIK |
| SEQ ID | VL | C-H- | DIVMTQTPLSSPVTLGQPASISCSASQGISNYLNWYQQRPGQPVKL |
| NO: 3036 | | VL.37 | LIYYTSSLHSGVPDRFSGSGAGTDYTLKISRVEAEDVGVYYCQQY |
| | | | SKLPRTFGGGTKVEIK |
| SEQ ID | VL | C-H- | EIVMTQSPDFQSVTPKEKVTITCSASQGISNYLNWYQQKPDQSVK |
| NO: 3037 | | VL.38 | LLIYYTSSLHSGVPSRFSGSGSGTDYTLTINSLEAEDAATYYCQQY |
| | | | SKLPRTFGGGTKVEIK |
| SEQ ID | VL | C-H- | EIVMTQTPLSLSITPGEQASISCSASQGISNYLNWYLQKARPVVKL |
| NO: 3038 | | VL.39 | LIYYTSSLHSGVPDRFSGSGSGTDYTLKISRVEAEDFGVYYCQQYS |
| | | | KLPRTFGGGTKVEIK |
| SEQ ID | VL | C-H- | EIVMTQTPLSLSITPGEQASMSCSASQGISNYLNWYLQKARPVVKL |
| NO: 3039 | | VL.40 | LIYYTSSLHSGVPDRFSGSGSGTDYTLKISRVEAEDFGVYYCQQYS |
| | | | KLPRTFGGGTKVEIK |

Humanized antibody C Variable HEAVY chain (VH)

| | | | |
|---|---|---|---|
| SEQ ID | VH | C-H-VH.1 | QVTLKESGPVLVKPTETLTLTCTVSGFSLTAYGVNWVRQPPGKAL |
| NO: 3040 | | | EWLGMIWGDGNTDYNSALKSRLTISKDNSKSQVVLTMTNMDPV |
| | | | DTATYYCARDRVTATLYAMDYWGQGTLVTVSS |
| SEQ ID | VH | C-H-VH.2 | QVTLKESGPALVKPTETLTLTCTVSGFSLTAYGVNWVRQPPGKAL |
| NO: 3041 | | | EWLGMIWGDGNTDYNSALKSRLIISKDNSKSQVVLTMTNMDPVD |
| | | | TATYYCARDRVTATLYAMDYWGQGTLVTVSS |
| SEQ ID | VH | C-H-VH.3 | QVTLKESGPALVKPTQTLTLTCTVSGFSLTAYGVNWVRQPPGKAL |
| NO: 3042 | | | EWLGMIWGDGNTDYNSALKSRLTISKDNSKSQVVLTMTNMDPV |
| | | | DTATYYCARDRVTATLYAMDYWGQGTLVTVSS |
| SEQ ID | VH | C-H-VH.4 | QVQLQESGPGLVKPSGTLSLTCAVSGFSLTAYGVNWVRQPPGKG |
| NO: 3043 | | | LEWLGMIWGDGNTDYNSALKSRLTISKDNSKSQVSLKLSSVTAA |
| | | | DTAVYYCARDRVTATLYAMDYWGQGTLVTVSS |
| SEQ ID | VH | C-H-VH.5 | QVTLKESGPTLVKPTQTLTLTCTVSGFSLTAYGVNWVRQPPGKAL |
| NO: 3044 | | | EWLGMIWGDGNTDYNSALKSRLTITKDNSKSQVVLTMTNMDPV |
| | | | DTATYYCARDRVTATLYAMDYWGQGTLVTVSS |
| SEQ ID | VH | C-H-VH.6 | QVTLKESGPALVKPTQTLTLTCTVSGFSLTAYGVNWVRQPPGKAL |
| NO: 3045 | | | EWLGMIWGDGNTDYNSALKSRLTITKDNSKSQVVLTMTNMDPV |
| | | | DTATYYCARDRVTATLYAMDYWGQGTLVTVSS |
| SEQ ID | VH | C-H-VH.7 | QVQLQESGPGLVKPSQTLSLTCTVSGFSLTAYGVNWVRQPPGKGL |
| NO: 3046 | | | EWLGMIWGDGNTDYNSALKSRLTISKDNSKSQVSLKLSSVTAAD |
| | | | TAVYYCARDRVTATLYAMDYWGQGTLVTVSS |
| SEQ ID | VH | C-H-VH.8 | QVQLQESGPGLVKPSETLSLTCTVSGFSLTAYGVNWVRQPPGKGL |
| NO: 3047 | | | EWLGMIWGDGNTDYNSALKSRLTISKDNSKSQVSLKLSSVTAAD |
| | | | TAVYYCARDRVTATLYAMDYWGQGTLVTVSS |
| SEQ ID | VH | C-H-VH.9 | QVQLQESGPGLVKPSQTLSLTCAVSGFSLTAYGVNWVRQPPGKG |
| NO: 3048 | | | LEWLGMIWGDGNTDYNSALKSRLTISKDNSKSQVSLKLSSVTAA |
| | | | DTAVYYCARDRVTATLYAMDYWGQGTLVTVSS |
| SEQ ID | VH | C-H- | QVQLQESGPGLVKPSDTLSLTCTVSGFSLTAYGVNWVRQPPGKGL |
| NO: 3049 | | VH.10 | EWLGMIWGDGNTDYNSALKSRLTISKDNSKSQVSLKLSSVTAAD |
| | | | TAVYYCARDRVTATLYAMDYWGQGTLVTVSS |
| SEQ ID | VH | C-H- | QVQLQESGPGLVKPSQTLSLTCTVSGFSLTAYGVNWVRQHPGKG |
| NO: 3050 | | VH.11 | LEWLGMIWGDGNTDYNSALKSRLTISKDNSKSQVSLKLSSVTAA |
| | | | DTAVYYCARDRVTATLYAMDYWGQGTLVTVSS |
| SEQ ID | VH | C-H- | QVQLQESGPGLVKPSQTLSLTCTVSGFSLTAYGVNWVRQPAGKG |
| NO: 3051 | | VH.12 | LEWLGMIWGDGNTDYNSALKSRLTISKDNSKSQVSLKLSSVTAA |
| | | | DTAVYYCARDRVTATLYAMDYWGQGTLVTVSS |
| SEQ ID | VH | C-H- | QVQLQESGPGLVKPSQTLSLTCAVSGFSLTAYGVNWVRQPPGKG |
| NO: 3052 | | VH.13 | LEWLGMIWGDGNTDYNSALKSRLTISKDNSKSQVSLKLSSVTAV |
| | | | DTAVYYCARDRVTATLYAMDYWGQGTLVTVSS |
| SEQ ID | VH | C-H- | QVQLQESGPGLVKPSETLSLTCTVSGFSLTAYGVNWVRQPPGKGL |
| NO: 3053 | | VH.14 | EWLGMIWGDGNTDYNSALKSRLTISKDNSKSHVSLKLSSVTAAD |
| | | | TAVYYCARDRVTATLYAMDYWGQGTLVTVSS |
| SEQ ID | VH | C-H- | QVQLQESGPGLVKPSETLSLTCAVSGFSLTAYGVNWVRQPPGKGL |
| NO: 3054 | | V15 | EWLGMIWGDGNTDYNSALKSRLTISKDNSKSQVSLKLSSVTAAD |
| | | | TAVYYCARDRVTATLYAMDYWGQGTLVTVSS |
| SEQ ID | VH | C-H- | QVQLQESGPGLVKPSQTLSLTCAVYGFSLTAYGVNWVRQPPGKG |
| NO: 3055 | | VH.16 | LEWLGMIWGDGNTDYNSALKSRLTISKDNSKSQVSLKLSSVTAA |
| | | | DTAVYYCARDRVTATLYAMDYWGQGTLVTVSS |
| SEQ ID | VH | C-H- | RVQLQESGPGLVKPSETLSLTCTVSGFSLTAYGVNWVRQPPGKGL |
| NO: 3056 | | VH.17 | EWLGMIWGDGNTDYNSALKSRLTISKDNSKSQVPLKLSSVTAAD |
| | | | TAVYYCARDRVTATLYAMDYWGQGTLVTVSS |
| SEQ ID | VH | C-H- | QVQLQESGPGLVKPSQTLSLTCTVSGFSLTAYGVNWVRQHPGKG |
| NO: 3057 | | VH.18 | LEWLGMIWGDGNTDYNSALKSLLTISKDNSKSQVSLKLSSVTAA |
| | | | DTAVYYCARDRVTATLYAMDYWGQGTLVTVSS |
| SEQ ID | VH | C-H- | QVQLQESGPGLVKPSDTLSLTCAVSGFSLTAYGVNWVRQPPGKG |
| NO: 3058 | | VH.19 | LEWLGMIWGDGNTDYNSALKSRLTISKDNSKSQVSLKLSSVTALD |
| | | | TAVYYCARDRVTATLYAMDYWGQGTLVTVSS |
| SEQ ID | VH | C-H- | QVQLQESGPGLVKPSDTLSLTCAVSGFSLTAYGVNWVRQPPGKG |
| NO: 3059 | | VH.20 | LEWLGMIWGDGNTDYNSALKSRLTISKDNSKSQVSLKLSSVTAV |
| | | | DTAVYYCARDRVTATLYAMDYWGQGTLVTVSS |
| SEQ ID | VH | C-H- | QVQLQESGSGLVKPSQTLSLTCAVSGFSLTAYGVNWVRQPPGKG |
| NO: 3060 | | VH.21 | LEWLGMIWGDGNTDYNSALKSRLTISKDNSKSQVSLKLSSVTAA |
| | | | DTAVYYCARDRVTATLYAMDYWGQGTLVTVSS |
| SEQ ID | VH | C-H- | EVQLVESGGGLVQPGRSLRLSCTVSGFSLTAYGVNWVRQAPGKG |
| NO: 3061 | | VH.22 | LEWLGMIWGDGNTDYNSALKSRLTISKDNSKSIVYLQMNSLKTE |
| | | | DTAVYYCARDRVTATLYAMDYWGQGTLVTVSS |
| SEQ ID | VH | C-H- | EVQLVESGGGLVQPGPSLRLSCTVSGFSLTAYGVNWVRQAPGKG |
| NO: 3062 | | VH.23 | LEWLGMIWGDGNTDYNSALKSRLTISKDNSKSIVYLQMNSLKTE |
| | | | DTAVYYCARDRVTATLYAMDYWGQGTLVTVSS |
| SEQ ID | VH | C-H- | QVQLQESGSGLVKPSQTLSLTCAVSGFSLTAYGVNWVRQSPGKG |
| NO: 3063 | | VH.24 | LEWLGMIWGDGNTDYNSALKSRLTISKDNSKSQVSLKLSSVTAA |
| | | | DTAVYYCARDRVTATLYAMDYWGQGTLVTVSS |
| SEQ ID | VH | C-H- | QVQLQESGPGLVKPSETLSLTCTVSGFSLTAYGVNWVRQPAGKG |
| NO: 3064 | | VH.25 | LEWLGMIWGDGNTDYNSALKSRLTISKDNSKSQVSLKLSSVTAA |
| | | | DTAVYYCARDRVTATLYAMDYWGQGTLVTVSS |
| SEQ ID | VH | C-H- | EVQLVESGGGLVKPGRSLRLSCTVSGFSLTAYGVNWVRQAPGKG |
| NO: 3065 | | VH.26 | LEWLGMIWGDGNTDYNSALKSRLTISKDNSKSIVYLQMNSLKTE |
| | | | DTAVYYCARDRVTATLYAMDYWGQGTLVTVSS |
| SEQ ID | VH | C-H- | QVQLQESGPGLVKPSETLSLTCAVYGFSLTAYGVNWVRQPPGKG |
| NO: 3066 | | VH.27 | LEWLGMIWGDGNTDYNSALKSRLTISKDNSKSQVYLKLSSVTAA |
| | | | DTAVYYCARDRVTATLYAMDYWGQGTLVTVSS |
| SEQ ID | VH | C-H- | QVQLQESGPGLVKPSDTLSLTCAVSGFSLTAYGVNWVRQPPGKG |
| NO: 3067 | | VH.28 | LEWLGMIWGDGNTDYNSALKSRLTISKDNSKSQVSLKLSSVTAV |
| | | | DTGVYYCARDRVTATLYAMDYWGQGTLVTVSS |
| SEQ ID | VH | C-H- | EVQLVESGGGLVQPGGSLRLSCAVSGFSLTAYGVNWVRQAPGKG |
| NO: 3068 | | VH.29 | LEWLGMIWGDGNTDYNSALKSRLTISKDNSKSSVYLQMNSLKTE |
| | | | DTAVYYCARDRVTATLYAMDYWGQGTLVTVSS |
| SEQ ID | VH | C-H- | EVQLVESGGGLVKPGGSLRLSCAVSGFSLTAYGVNWVRQAPGKG |
| NO: 3069 | | VH.30 | LEWLGMIWGDGNTDYNSALKSRLTISKDNSKSTVYLQMNSLKTE |
| | | | DTAVYYCARDRVTATLYAMDYWGQGTLVTVSS |
| SEQ ID | VH | C-H- | QVQLQQSGPGLVKPSQTLSLTCAVSGFSLTAYGVNWVRQSPSRGL |
| NO: 3070 | | VH.31 | EWLGMIWGDGNTDYNSALKSRLTINKDNSKSQVSLQLNSVTPED |
| | | | TAVYYCARDRVTATLYAMDYWGQGTLVTVSS |
| SEQ ID | VH | C-H- | QVQLVESGGGLVQPGGSLRLSCSVSGFSLTAYGVNWVRQAPGKG |
| NO: 3071 | | VH.32 | LEWLGMIWGDGNTDYNSALKSRLTISKDNSKSTVYLQMNSLRAE |
| | | | DTAVYYCARDRVTATLYAMDYWGQGTLVTVSS |
| SEQ ID | VH | C-H- | QVQLQQWGAGLLKPSETLSLTCAVYGFSLTAYGVNWVRQPPGK |
| NO: 3072 | | VH.33 | GLEWLGMIWGDGNTDYNSALKSRLTISKDNSKSQVSLKLSSVTA |
| | | | ADTAVYYCARDRVTATLYAMDYWGQGTLVTVSS |
| SEQ ID | VH | C-H- | QVQLVESGGGVVQPGRSLRLSCAVSGFSLTAYGVNWVRQAPGK |
| NO: 3073 | | VH.34 | GLEWLGMIWGDGNTDYNSALKSRLTISKDNSTSTVFLQMNSLRA |
| | | | EDTAVYYCARDRVTATLYAMDYWGQGTLVTVSS |
| SEQ ID | VH | C-H- | EVQLVESGGGLVQPGGSLRLSCAVSGFSLTAYGVNWVRQAPGKG |
| NO: 3074 | | VH.35 | LEWLGMIWGDGNTDYNSALKSRLTISKDNSKSTVYLQMNSLRAE |
| | | | DTAVYYCARDRVTATLYAMDYWGQGTLVTVSS |
| SEQ ID | VH | C-H- | EVQLVESGGGLVQPGGSLRLSCAVSGFSLTAYGVNWVRQAPGKG |
| NO: 3075 | | VH.36 | LEWLGMIWGDGNTDYNSALKSRLTISKDNAKSSVYLQMNSLRDE |
| | | | DTAVYYCARDRVTATLYAMDYWGQGTLVTVSS |
| SEQ ID | VH | C-H- | EVQLLESGGGLVQPGGSLRLSCAVSGFSLTAYGVNWVRQAPGKG |
| NO: 3076 | | VH.37 | LEWLGMIWGDGNTDYNSALKSRLTISKDNSKSTVYLQMNSLRAE |
| | | | DTAVYYCARDRVTATLYAMDYWGQGTLVTVSS |
| SEQ ID | VH | C-H- | QVQLVESGGGLVKPGGSLRLSCAVSGFSLTAYGVNWVRQAPGKG |
| NO: 3077 | | VH.38 | LEWLGMIWGDGNTDYNSALKSRLTISKDNAKSSVYLQMNSLRAE |
| | | | DTAVYYCARDRVTATLYAMDYWGQGTLVTVSS |
| SEQ ID | VH | C-H- | EVQLVESGGGLVQPGGSLKLSCAVSGFSLTAYGVNWVRQASGKG |
| NO: 3078 | | VH.39 | LEWLGMIWGDGNTDYNSALKSRLTISKDNSKSTVYLQMNSLKTE |
| | | | DTAVYYCARDRVTATLYAMDYWGQGTLVTVSS |
| SEQ ID | VH | C-H- | QVQLLESGGGLVKPGGSLRLSCAVSGFSLTAYGVNWVRQAPGKG |
| NO: 3079 | | VH.40 | LEWLGMIWGDGNTDYNSALKSRLTISKDNAKSSVYLQMNSLRAE |
| | | | DTAVYYCARDRVTATLYAMDYWGQGTLVTVSS |
| SEQ ID | VH | C-H- | QVQLVESGGGVVQPGRSLRLSCAVSGFSLTAYGVNWVRQAPGK |
| NO: 3080 | | VH.41 | GLEWLGMIWGDGNTDYNSALKSRLTISKDNSKSTVYLQMNSLRA |
| | | | EDTAVYYCARDRVTATLYAMDYWGQGTLVTVSS |
| SEQ ID | VH | C-H- | QVQLVESGGGVVQPGRSLRLSCAVSGFSLTAYGVNWVRQAPGK |
| NO: 3081 | | VH.42 | GLEWLGMIWGDGNTDYNSALKSRLTISKDNSKSRVYLQMNSLRA |
| | | | EDTAVYYCARDRVTATLYAMDYWGQGTLVTVSS |
| SEQ ID | VH | C-H- | QVQLVESGGGVVQPGRSLRLSCAVSGFSLTAYGVNWVRQAPGK |
| NO: 3082 | | VH.43 | GLEWLGMIWGDGNTDYNSALKSRLAISKDNSKSTVYLQMNSLRA |
| | | | EDTAVYYCARDRVTATLYAMDYWGQGTLVTVSS |
| SEQ ID | VH | C-H- | QVQLVESGGGVVQPGGSLRLSCAVSGFSLTAYGVNWVRQAPGK |
| NO: 3083 | | VH.44 | GLEWLGMIWGDGNTDYNSALKSRLTISKDNSKSTVYLQMNSLRA |
| | | | EDTAVYYCARDRVTATLYAMDYWGQGTLVTVSS |
| SEQ ID | VH | C-H- | EVQLVESGGGLVQPGGSLRLSCAVSGFSLTAYGVNWVRQAPGKG |
| NO: 3084 | | VH.45 | LEWLGMIWGDGNTDYNSALKSRLTISKDNAKSTVYLQMNSLRAE |
| | | | DTAVYYCARDRVTATLYAMDYWGQGTLVTVSS |
| SEQ ID | VH | C-H- | EVQLVESGGGLVQPGGSLRLSCAVSGFSLTAYGVNWVRQAPGKG |
| NO: 3085 | | VH.46 | LEWLGMIWGDGNTDYNSALKSRLTISKDNAKSSVYLQMNSLRAE |
| | | | DTAVYYCARDRVTATLYAMDYWGQGTLVTVSS |
| SEQ ID | VH | C-H- | EVQLVESGGVVVQPGGSLRLSCAVSGFSLTAYGVNWVRQAPGKG |
| NO: 3086 | | VH.47 | LEWLGMIWGDGNTDYNSALKSRLTISKDNSKSSVYLQMNSLRTE |
| | | | DTALYYCARDRVTATLYAMDYWGQGTLVTVSS |
| SEQ ID | VH | C-H- | EVQLVESGGGLVQPGGSLRLSCAVSGFSLTAYGVNWVRQAPGKG |
| NO: 3087 | | VH.48 | LEWLGMIWGDGNTDYNSALKSRLTISKHNSKSTVYLQMNSLRAE |
| | | | DTAVYYCARDRVTATLYAMDYWGQGTLVTVSS |
| SEQ ID | VH | C-H- | EVQLVESGGGLVKPGGSLRLSCAVSGFSLTAYGVNWVRQAPGKG |
| NO: 3088 | | VH.49 | LEWLGMIWGDGNTDYNSALKSRLTISKDNAKSSVYLQMNSLRAE |
| | | | DTAVYYCARDRVTATLYAMDYWGQGTLVTVSS |
| SEQ ID | VH | C-H- | EVQLVESGGGLIQPGGSLRLSCAVSGFSLTAYGVNWVRQPPGKGL |
| NO: 3089 | | VH.50 | EWLGMIWGDGNTDYNSALKSRLTISKDNSKSTVYLQMNSLRAED |
| | | | TAVYYCARDRVTATLYAMDYWGQGTLVTVSS |

[0456] Exemplary anti-TCRβ V5 antibodies of the disclosure are provided in Table 11A. In some embodiments, the anti-TCRβ V5 is antibody E, e.g., humanized antibody E (antibody E-H), as provided in Table 11A. In some embodiments, the anti-TCRβV antibody comprises one or more (e.g., all three) of a LC CDR1, LC CDR2, and LC CDR3 provided in Table 11A; and/or one or more (e.g., all three) of a HC CDR1, HC CDR2, and HC CDR3 provided in Table 11A, or a sequence with at least 95% identity thereto. In some embodiments, antibody E comprises a variable heavy chain (VH) and/or a variable light chain (VL) provided in Table 11A, or a sequence with at least 95% identity thereto.

[0457] In some embodiments, antibody E comprises a heavy chain comprising the amino acid sequence of SEQ ID NO: 3284 and/or a light chain comprising the amino acid sequence of SEQ ID NO: 3285, or a sequence with at least 95% identity thereto.

TABLE 11A
Amino acid sequences for anti TCRβ V5 antibodies
Amino acid and nucleotide sequences for murine and humanized antibody molecules which bind to TCRVB
5 (e.g., TCRVB 5-5 or TCRVB 5-6). The amino acid the heavy and light chain CDRs, and the amino acid
and nucleotide sequences of the heavy and light chain variable regions, and the heavy and light
chains are shown.
Murine antibody E, also referred to as MH3-2

| | | |
|---|---|---|
| SEQ ID NO: 1298 | HC CDR1 (Kabat) | SSWMN |
| SEQ ID NO: 1299 | HC CDR2 (Kabat) | RIYPGDGDTKYNGKFKG |
| SEQ ID NO: 1300 | HC CDR3 (Kabat) | RGTGGWYFDV |
| SEQ ID NO: 1302 | HC CDR1 (Chothia) | GYAFSSS |
| SEQ ID NO: 1303 | HC CDR2 (Chothia) | YPGDGD |
| SEQ ID NO: 1301 | HC CDR3 (Chothia) | RGTGGWYFDV |
| SEQ ID NO: 1304 | HC CDR1 (Combined) | GYAFSSSWMN |
| SEQ ID NO: 1299 | HC CDR2 (Combined) | RIYPGDGDTKYNGKFKG |
| SEQ ID NO: 1301 | HC CDR3(Combined) | RGTGGWYFDV |
| SEQ ID NO: 1305 | LC CDR1 (Kabat) | RASESVDSSGNSFMH |
| SEQ ID NO: 1306 | LC CDR2 (Kabat) | RASNLES |
| SEQ ID NO: 1307 | LC CDR3 (Kabat) | QQSFDDPFT |
| SEQ ID NO: 1308 | LC CDR1 (Chothia) | SESVDSSGNSF |
| SEQ ID NO: 1306 | LC CDR2 (Chothia) | RASNLES |
| SEQ ID NO: 1307 | LC CDR3 (Chothia) | QQSFDDPFT |
| SEQ ID NO: 1305 | LC CDR1 (Combined) | RASESVDSSGNSFMH |
| SEQ ID NO: 1306 | LC CDR2 (Combined) | RASNLES |
| SEQ ID NO: 1307 | LC CDR3(Combined) | QQSFDDPFT |
| SEQ ID NO: 3091 | VH | QVQLQQSGPELVKPGASVKISCKASGYAFSSSWMN |
| | | WVKQRPGQGLEWIGRIYPGDGDTKYNGKFKGKAT |
| | | LTADKSSSTAYMHLSSLTSVDSAVYFCARRGTGGW |
| | | YFDVWGAGTTVTVSS |
| SEQ ID NO: 3284 | Heavy chain | METDTLLLWVLLLWVPGSTGQVQLQQSGPELVKPG |
| | | ASVKISCKASGYAFSSSWMNWVKQRPGQGLEWIGR |
| | | IYPGDGDTKYNGKFKGKATLTADKSSSTAYMHLSS |
| | | LTSVDSAVYFCARRGTGGWYFDVWGAGTTVTVSS |
| | | AKTTAPSVYPLAPVCGDTTGSSVTLGCLVKGYFPEP |
| | | VTLTWNSGSLSSGVHTFPAVLQSDLYTLSSSVTVTS |
| | | STWPSQSITCNVAHPASSTKVDKKIEPRGPTIKPCPP |
| | | CKCPAPNLLGGPSVFIFPPKIKDVLMISLSPIVTCVVV |
| | | DVSEDDPDVQISWFVNNVEVHTAQTQTHREDYNST |
| | | LRVVSALPIQHQDWMSGKEFKCKVNNKDLPAPIER |
| | | TISKPKGSVRAPQVYVLPPPEEEMTKKQVTLTCMVT |
| | | DFMPEDIYVEWTNNGKTELNYKNTEPVLDSDGSYF |
| | | MYSKLRVEKKNWVERNSYSCSVVHEGLHNHHTTK |
| | | SFSRTPGK |
| SEQ ID NO: 311 | VL | DIVLTQSPASLAVSLGQRATISCRASESVDSSGNSFM |
| | | HWYQQKPGQPPQLLIYRASNLESGIPARFSGSGSRT |
| | | DFTLTINPVEADDVATFYCQQSFDDPFTFGSGTKLEI |
| | | K |
| SEQ ID NO: 3285 | Light chain | METDTLLLWVLLLWVPGSTGDIVLTQSPASLAVSL |
| | | GQRATISCRASESVDSSGNSFMHWYQQKPGQPPQL |
| | | LIYRASNLESGIPARFSGSGSRTDFTLTINPVEADDV |
| | | ATFYCQQSFDDPFTFGSGTKLEIKRADAAPTVSIFPP |
| | | SSEQLTSGGASVVCFLNNFYPKDINVKWKIDGSERQ |
| | | NGVLNSWTDQDSKDSTYSMSSTLTLTKDEYERHNS |
| | | YTCEATHKTSTSPIVKSFNRNEC |

Humanized antibody E (E-H antibody)
Variable light chain (VL)

| | | | |
|---|---|---|---|
| SEQ ID | VL | E-H.1 | DIVLTQSPDSLAVSLGERATINCRASESVDSSGNSFMHWYQQKPGQPP |
| NO: 312 | | | QLLIYRASNLESGVPDRFSGSGSRTDFTLTISSLQAEDVAVYYCQQSFD |
| | | | DPFTFGQGTKLEIK |
| SEQ ID | VL | E-H.2 | EIVLTQSPATLSLSPGERATLSCRASESVDSSGNSFMHWYQQKPGQAP |
| NO: 313 | | | QLLIYRASNLESGIPARFSGSGSRTDFTLTISSLEPEDFAVYYCQQSFDD |
| | | | PFTFGQGTKLEIK |
| SEQ ID | VL | E-H.3 | EIVLTQSPATLSLSPGERATLSCRASESVDSSGNSFMHWYQQKPGQAP |
| NO: 314 | | | QLLIYRASNLESGIPARFSGSGSRTDFTLTISRLEPEDFAVYYCQQSFDD |
| | | | PFTFGQGTKLEIK |
| SEQ ID | VL | E-H.4 | EIVLTQSPATLSLSPGERATLSCRASESVDSSGNSFMHWYQQKPGQAP |
| NO: 315 | | | QLLIYRASNLESGIPARFSGSGSRTDFTLTISSLQPEDFAVYYCQQSFDD |
| | | | PFTFGQGTKLEIK |
| SEQ ID | VL | E-H.5 | DIQLTQSPSSLSASVGDRVTITCRASESVDSSGNSFMHWYQQKPGQAP |
| NO: 316 | | | QLLIYRASNLESGVPSRFSGSGSRTDFTLTISSLQPEDVATYYCQQSFD |
| | | | DPFTFGQGTKLEIK |
| SEQ ID | VL | E-H.6 | EIVLTQSPATLSLSPGERATLSCRASESVDSSGNSFMHWYQQKPGQAP |
| NO: 317 | | | QLLIYRASNLESGIPARFSGSGPRTDFTLTISSLEPEDFAVYYCQQSFDD |
| | | | PFTFGQGTKLEIK |
| SEQ ID | VL | E-H.7 | EIVLTQSPATLSLSPGERATLSCRASESVDSSGNSFMHWYQQKPGQAP |
| NO: 318 | | | QLLIYRASNLESGIPDRFSGSGSRTDFTLTISRLEPEDFAVYYCQQSFDD |
| | | | PFTFGQGTKLEIK |
| SEQ ID | VL | E-H.8 | DIQLTQSPSSLSASVGDRVTITCRASESVDSSGNSFMHWYQQKPGKVP |
| NO: 319 | | | QLLIYRASNLESGVPSRFSGSGSRTDFTLTISSLQPEDVATYYCQQSFD |
| | | | DPFTFGQGTKLEIK |
| SEQ ID | VL | E-H.9 | DIQLTQSPSSLSASVGDRVTITCRASESVDSSGNSFMHWYQQKPGKTP |
| NO: 320 | | | QLLIYRASNLESGIPSRFSGSGSRTDFTLTIRSLQPEDFATYYCQQSFDD |
| | | | PFTFGQGTKLEIK |
| SEQ ID | VL | E-H.10 | EIVLTQSPGTLSLSPGERATLSCRASESVDSSGNSFMHWYQQKPGQAP |
| NO: 321 | | | QLLIYRASNLESGIPDRFSGSGSRTDFTLTISRLEPEDFAVYYCQQSFDD |
| | | | PFTFGQGTKLEIK |
| SEQ ID | VL | E-H.11 | EIVLTQSPATLSLSPGERATLSCRASESVDSSGNSFMHWYQQKPGLAP |
| NO: 322 | | | QLLIYRASNLESGIPDRFSGSGSRTDFTLTISRLEPEDFAVYYCQQSFDD |
| | | | PFTFGQGTKLEIK |
| SEQ ID | VL | E-H.12 | DIQLTQSPSSLSASVGDRVTITCRASESVDSSGNSFMHWYQQKPGKAP |
| NO: 323 | | | QLLIYRASNLESGVPSRFSGSGSRTDFTLTISSLQPEDFATYYCQQSFDD |
| | | | PFTFGQGTKLEIK |
| SEQ ID | VL | E-H.13 | DIQLTQSPSSVSASVGDRVTITCRASESVDSSGNSFMHWYQQKPGKAP |
| NO: 324 | | | QLLIYRASNLESGVPSRFSGSGSRTDFTLTISSLQPEDFATYYCQQSFDD |
| | | | PFTFGQGTKLEIK |
| SEQ ID | VL | E-H.14 | AIQLTQSPSSLSASVGDRVTITCRASESVDSSGNSFMHWYQQKPGKAP |
| NO: 325 | | | QLLIYRASNLESGVPSRFSGSGSRTDFTLTISSLQPEDFATYYCQQSFDD |
| | | | PFTFGQGTKLEIK |
| SEQ ID | VL | E-H.15 | DIQLTQSPSFLSASVGDRVTITCRASESVDSSGNSFMHWYQQKPGKAP |
| NO: 326 | | | QLLIYRASNLESGVPSRFSGSGSRTEFTLTISSLQPEDFATYYCQQSFDD |
| | | | PFTFGQGTKLEIK |
| SEQ ID | VL | E-H.16 | DIQLTQSPSSLSASVGDRVTITCRASESVDSSGNSFMHWYQQKPGKAP |
| NO: 327 | | | QLLIYRASNLESGVPSRFSGSGSRTDFTFTISSLQPEDIATYYCQQSFDD |
| | | | PFTFGQGTKLEIK |
| SEQ ID | VL | E-H.17 | EIVLTQSPATLSVSPGERATLSCRASESVDSSGNSFMHWYQQKPGQAP |
| NO: | | | QLLIYRASNLESGIPARFSGSGSRTEFTLTISILQSEDFAVYYCQQSFDD |
| 3109 | | | PFTFGQGTKLEIK |
| SEQ ID | VL | E-H.18 | EIVLTQSPATLSVSPGERATLSCRASESVDSSGNSFMHWYQQKPGQAP |
| NO: | | | QLLIYRASNLESGIPARFSGSGSRTEFTLTISSLQSEDFAVYYCQQSFDD |
| 3110 | | | PFTFGQGTKLEIK |
| SEQ ID | VL | E-H.19 | AIRLTQSPFSLSASVGDRVTITCRASESVDSSGNSFMHWYQQKPAKAP |
| NO: | | | QLFIYRASNLESGVPSRFSGSGSRTDFTLTISSLQPEDFATYYCQQSFDD |
| 3111 | | | PFTFGQGTKLEIK |
| SEQ ID | VL | E-H.20 | DIQLTQSPSSLSASVGDRVTITCRASESVDSSGNSFMHWYQQKPGKAP |
| NO: | | | QSLIYRASNLESGVPSRFSGSGSRTDFTLTISSLQPEDFATYYCQQSFDD |
| 3112 | | | PFTFGQGTKLEIK |
| SEQ ID | VL | E-H.21 | DIQLTQSPSSLSASVGDRVTITCRASESVDSSGNSFMHWYQQKPGKAP |
| NO: | | | QRLIYRASNLESGVPSRFSGSGSRTEFTLTISNLQPEDFATYYCQQSFD |
| 3113 | | | DPFTFGQGTKLEIK |
| SEQ ID | VL | E-H.22 | DIQLTQSPSTLSASVGDRVTITCRASESVDSSGNSFMHWYQQKPGKAP |
| NO: | | | QLLIYRASNLESGVPSRFSGSGSRTEFTLTISSLQPDDFATYYCQQSFDD |
| 3114 | | | PFTFGQGTKLEIK |
| SEQ ID | VL | E-H.23 | EIVLTQSPDFQSVTPKEKVTITCRASESVDSSGNSFMHWYQQKPDQSP |
| NO: | | | QLLIYRASNLESGVPSRFSGSGSRTDFTLTINSLEAEDAATYYCQQSFD |
| 3115 | | | DPFTFGQGTKLEIK |
| SEQ ID | VL | E-H.24 | DIQLTQSPSSLSASVGDRVTITCRASESVDSSGNSFMHWYQQKPGKAP |
| NO: | | | QSLIYRASNLESGVPSKFSGSGSRTDFTLTISSLQPEDFATYYCQQSFDD |
| 3116 | | | PFTFGQGTKLEIK |
| SEQ ID | VL | E-H.25 | DIQLTQSPSSLSASVGDRVTITCRASESVDSSGNSFMHWYQQKPGKAP |
| NO: 328 | | | QRLIYRASNLESGVPSRFSGSGSRTEFTLTISSLQPEDFATYYCQQSFDD |
| | | | PFTFGQGTKLEIK |
| SEQ ID | VL | E-H.26 | DIVLTQTPLSLSVTPGQPASISCRASESVDSSGNSFMHWYLQKPGQPPQ |
| NO: 329 | | | LLIYRASNLESGVPDRFSGSGSRTDFTLKISRVEAEDVGVYYCQQSFD |
| | | | DPFTFGQGTKLEIK |
| SEQ ID | VL | E-H.27 | DIQLTQSPSSLSASVGDRVTITCRASESVDSSGNSFMHWYQQKPEKAP |
| NO: 330 | | | QSLIYRASNLESGVPSRFSGSGSRTDFTLTISSLQPEDFATYYCQQSFDD |
| | | | PFTFGQGTKLEIK |
| SEQ ID | VL | E-H.28 | EIVLTQSPPTLSLSPGERVTLSCRASESVDSSGNSFMHWYQQKPGQAP |
| NO: 331 | | | QLLIYRASNLESGIPARFSGSGSRTDFTLTISSLQPEDFAVYYCQQSFDD |
| | | | PFTFGQGTKLEIK |
| SEQ ID | VL | E-H.29 | DIQLTQSPSAMSASVGDRVTITCRASESVDSSGNSFMHWYQQKPGKV |
| NO: 332 | | | PQRLIYRASNLESGVPSRFSGSGSRTEFTLTISSLQPEDFATYYCQQSFD |
| | | | DPFTFGQGTKLEIK |
| SEQ ID | VL | E-H.30 | DIVLTQSPLSLPVTPGEPASISCRASESVDSSGNSFMHWYLQKPGQSPQ |
| NO:333 | | | LLIYRASNLESGVPDRFSGSGSRTDFTLKISRVEAEDVGVYYCQQSFD |
| | | | DPFTFGQGTKLEIK |
| SEQ ID | VL | E-H.31 | DIVLTQTPLSLPVTPGEPASISCRASESVDSSGNSFMHWYLQKPGQSPQ |
| NO: 334 | | | LLIYRASNLESGVPDRFSGSGSRTDFTLKISRVEAEDVGVYYCQQSFD |
| | | | DPFTFGQGTKLEIK |
| SEQ ID | VL | E-H.32 | DIVLTQTPLSLSVTPGQPASISCRASESVDSSGNSFMHWYLQKPGQSPQ |
| NO: 335 | | | LLIYRASNLESGVPDRFSGSGSRTDFTLKISRVEAEDVGVYYCQQSFD |
| | | | DPFTFGQGTKLEIK |
| SEQ ID | VL | E-H.33 | EIVLTQSPPTLSLSPGERVTLSCRASESVDSSGNSFMHWYQQKPGQAP |
| NO: 336 | | | QLLIYRASNLESSIPARFSGSGSRTDFTLTISSLQPEDFAVYYCQQSFDD |
| | | | PFTFGQGTKLEIK |
| SEQ ID | VL | E-H.34 | DIVLTQSPLSLPVTLGQPASISCRASESVDSSGNSFMHWYQQRPGQSPQ |
| NO: 337 | | | RLIYRASNLESGVPDRFSGSGSRTDFTLKISRVEAEDVGVYYCQQSFD |
| | | | DPFTFGQGTKLEIK |
| SEQ ID | VL | E-H.35 | DIVLTQTPLSSPVTLGQPASISCRASESVDSSGNSFMHWYQQRPGQPPQ |
| NO: | | | LLIYRASNLESGVPDRFSGSGARTDFTLKISRVEAEDVGVYYCQQSFD |
| 3127 | | | DPFTFGQGTKLEIK |
| SEQ ID | VL | E-H.36 | DIVLTQSPAFLSVTPGEKVTITCRASESVDSSGNSFMHWYQQKPDQAP |
| NO: | | | QLLIYRASNLESGVPSRFSGSGSRTDFTFTISSLEAEDAATYYCQQSFD |
| 3128 | | | DPFTFGQGTKLEIK |
| SEQ ID | VL | E-H.37 | DIQLIQSPSFLSASVGDRVSIICRASESVDSSGNSFMHWYLQKPGKSPQ |
| NO: | | | LFIYRASNLESGVSSRFSGRGSRTDFTLTIISLKPEDFAAYYCQQSFDDP |
| 3129 | | | FTFGQGTKLEIK |
| SEQ ID | VL | E-H.38 | EIVLTQTPLSLSITPGEQASISCRASESVDSSGNSFMHWYLQKARPVPQ |
| NO: | | | LLIYRASNLESGVPDRFSGSGSRTDFTLKISRVEAEDFGVYYCQQSFDD |
| 3130 | | | PFTFGQGTKLEIK |
| SEQ ID | VL | E-H.39 | EIVLTQTPLSLSITPGEQASMSCRASESVDSSGNSFMHWYLQKARPVP |
| NO: | | | QLLIYRASNLESGVPDRFSGSGSRTDFTLKISRVEAEDFGVYYCQQSFD |
| 3131 | | | DPFTFGQGTKLEIK |
| SEQ ID | VL | E-H.40 | EITLTQSPAFMSATPGDKVNISCRASESVDSSGNSFMHWYQQKPGEAP |
| NO: | | | QFIIYRASNLESGIPPRFSGSGYRTDFTLTINNIESEDAAYYYCQQSFDD |
| 3132 | | | PFTFGQGTKLEIK |

Variable HEAVY chain (VH)

| | | | |
|---|---|---|---|
| SEQ ID | VH | E-H.1 | QVQLVQSGAEVKKPGASVKVSCKASGYAFSSSWMNWVRQAPGQGL |
| NO: | | | EWIGRIYPGDGDTKYNGKFKGRATLTADKSTSTAYMELSSLRSEDTA |
| 3133 | | | VYYCARRGTGGWYFDVWGQGTTVTVSS |
| SEQ ID | VH | E-H.2 | QVQLVQSGAEVKKPGSSVKVSCKASGYAFSSSWMNWVRQAPGQGL |
| NO: | | | EWIGRIYPGDGDTKYNGKFKGRATLTADKSTSTAYMELSSLRSEDTA |
| 3134 | | | VYYCARRGTGGWYFDVWGQGTTVTVSS |
| SEQ ID | VH | E-H.3 | QVQLVQSGAEVKKPGASVKVSCKASGYAFSSSWMNWVRQAPGKGL |
| NO: | | | EWIGRIYPGDGDTKYNGKFKGRATLTADKSTSTAYMELSSLRSEDTA |
| 3135 | | | VYYCARRGTGGWYFDVWGQGTTVTVSS |
| SEQ ID | VH | E-H.4 | QVQLVQSGAEVKKPGASVKVSCKASGYAFSSSWMNWVRQAPGQEL |
| NO: | | | EWIGRIYPGDGDTKYNGKFKGRATLTADKSISTAYMELSSLRSEDTAT |
| 3136 | | | YYCARRGTGGWYFDVWGQGTTVTVSS |
| SEQ ID | VH | E-H.5 | EVQLVQSGAEVKKPGATVKISCKASGYAFSSSWMNWVQQAPGKGLE |
| NO: | | | WIGRIYPGDGDTKYNGKFKGRATLTADKSTSTAYMELSSLRSEDTAV |
| 3137 | | | YYCARRGTGGWYFDVWGQGTTVTVSS |
| SEQ ID | VH | E-H.6 | QVQLVQSGAEVKKTGSSVKVSCKASGYAFSSSWMNWVRQAPGQAL |
| NO: | | | EWIGRIYPGDGDTKYNGKFKGRATLTADKSMSTAYMELSSLRSEDTA |
| 3138 | | | MYYCARRGTGGWYFDVWGQGTTVTVSs |
| SEQ ID | VH | E-H.7 | QVQLVQSGAEVKKPGASVKVSCKASGYAFSSSWMNWVRQAPGQRL |
| NO: | | | EWIGRIYPGDGDTKYNGKFKGRATLTADKSASTAYMELSSLRSEDMA |
| 3139 | | | VYYCARRGTGGWYFDVWGQGTTVTVSS |
| SEQ ID | VH | E-H.8 | QVQLVQSGAEVKKPGASVKVSCKASGYAFSSSWMNWVRQAPGQGL |
| NO: | | | EWIGRIYPGDGDTKYNGKFKGRATLTADKSTSTAYMELRSLRSDDMA |
| 3140 | | | VYYCARRGTGGWYFDVWGQGTTVTVSS |
| SEQ ID | VH | E-H.9 | QVQLVQSGAEVKKPGASVKVSCKASGYAFSSSWMNWVRQAPGQRL |
| NO: | | | EWIGRIYPGDGDTKYNGKFKGRATLTADKSASTAYMELSSLRSEDTA |
| 3141 | | | VYYCARRGTGGWYFDVWGQGTTVTVSS |
| SEQ ID | VH | E-H.10 | QVQLVQSGAEVKKPGASVKVSCKASGYAFSSSWMNWVRQAPGQGL |
| NO: | | | EWIGRIYPGDGDTKYNGKFKGRATLTADKSTSTAYMELRSLRSDDTA |
| 3142 | | | VYYCARRGTGGWYFDVWGQGTTVTVSS |
| SEQ ID | VH | E-H.1l | QVQLVQSGAEVKKPGASVKVSCKASGYAFSSSWMNWVRQAPGQGL |
| NO: | | | EWIGRIYPGDGDTKYNGKFKGRATLTADKSISTAYMELSRLRSDDTA |
| 3143 | | | VYYCARRGTGGWYFDVWGQGTTVTVSS |
| SEQ ID | VH | E-H.12 | QVQLVQSGAEVKKPGASVKVSCKASGYAFSSSWMNWVRQAPGQGL |
| NO: | | | EWIGRIYPGDGDTKYNGKFKGRATLTADKSISTAYMELSRLRSDDTV |
| 3144 | | | VYYCARRGTGGWYFDVWGQGTTVTVSS |
| SEQ ID | VH | E-H.13 | QVQLVQSGAEVKKPGASVKVSCKASGYAFSSSWMNWVRQAPGQGL |
| NO: | | | EWIGRIYPGDGDTKYNGKFKGWATLTADKSISTAYMELSRLRSDDTA |
| 3145 | | | VYYCARRGTGGWYFDVWGQGTTVTVSS |
| SEQ ID | VH | E-H.14 | QVQLVQSGAEVKKPGASVKVSCKASGYAFSSSWMNWVRQATGQGL |
| NO: | | | EWIGRIYPGDGDTKYNGKFKGRATLTANKSISTAYMELSSLRSEDTAV |
| 3146 | | | YYCARRGTGGWYFDVWGQGTTVTVSS |
| SEQ ID | VH | E-H.15 | QVQLVQSGSELKKPGASVKVSCKASGYAFSSSWMNWVRQAPGQGLE |
| NO: | | | WIGRIYPGDGDTKYNGKFKGRAVLSADKSVSTAYLQISSLKAEDTAV |
| 3147 | | | YYCARRGTGGWYFDVWGQGTTVTVSS |
| SEQ ID | VH | E-H.16 | QVQLVQSGPEVKKPGTSVKVSCKASGYAFSSSWMNWVRQARGQRLE |
| NO: | | | WIGRIYPGDGDTKYNGKFKGRATLTADKSTSTAYMELSSLRSEDTAV |
| 3148 | | | YYCARRGTGGWYFDVWGQGTTVTVSS |
| SEQ ID | VH | E-H.17 | EVQLVQSGAEVKKPGESLKISCKASGYAFSSSWMNWVRQMPGKGLE |
| NO: | | | WIGRIYPGDGDTKYNGKFKGQATLSADKSISTAYLQWSSLKASDTAM |
| 3149 | | | YYCARRGTGGWYFDVWGQGTTVTVSS |
| SEQ ID | VH | E-H.18 | QVQLVQSGSELKKPGASVKVSCKASGYAFSSSWMNWVRQAPGQGLE |
| NO: | | | WIGRIYPGDGDTKYNGKFKGRAVLSADKSVSMAYLQISSLKAEDTAV |
| 3150 | | | YYCARRGTGGWYFDVWGQGTTVTVSS |
| SEQ ID | VH | E-H.19 | QVQLVQSGHEVKQPGASVKVSCKASGYAFSSSWMNWVPQAPGQGL |
| NO: | | | EWIGRIYPGDGDTKYNGKFKGRAVLSADKSASTAYLQISSLKAEDMA |
| 3151 | | | MYYCARRGTGGWYFDVWGQGTTVTVSs |
| SEQ ID | VH | E-H.20 | EVQLVQSGAEVKKPGESLKISCKASGYAFSSSWMNWVRQMPGKGLE |
| NO: | | | WIGRIYPGDGDTKYNGKFKGQATLSADKPISTAYLQWSSLKASDTAM |
| 3152 | | | YYCARRGTGGWYFDVWGQGTTVTVSS |
| SEQ ID | VH | E-H.21 | EVQLVQSGAEVKKPGESLRISCKASGYAFSSSWMNWVRQMPGKGLE |
| NO: | | | WIGRIYPGDGDTKYNGKFKGQATLSADKSISTAYLQWSSLKASDTAM |
| 3153 | | | YYCARRGTGGWYFDVWGQGTTVTVSS |
| SEQ ID | VH | E-H.22 | EVQLVQSGAEVKKPGESLRISCKASGYAFSSSWMNWVRQMPGKGLE |
| NO: | | | WIGRIYPGDGDTKYNGKFKGHATLSADKSISTAYLQWSSLKASDTAM |
| 3154 | | | YYCARRGTGGWYFDVWGQGTTVTVSS |
| SEQ ID | VH | E-H.23 | QVQLVQSGAEVKKTGSSVKVSCKASGYAFSSSWMNWVRQAPRQAL |
| NO: | | | EWIGRIYPGDGDTKYNGKFKGRATLTADKSMSTAYMELSSLRSEDTA |
| 3155 | | | MYYCARRGTGGWYFDVWGQGTTVTVSS |
| SEQ ID | VH | E-H.24 | EVQLVESGGGLVQPGRSLRLSCTASGYAFSSSWMNWVRQAPGKGLE |
| NO: | | | WIGRIYPGDGDTKYNGKFKGRATLSADKSKSIAYLQMNSLKTEDTAV |
| 3156 | | | YYCARRGTGGWYFDVWGQGTTVTVSS |
| SEQ ID | VH | E-H.25 | EVQLVESGGGLVQPGPSLRLSCTASGYAFSSSWMNWVRQAPGKGLE |
| NO: | | | WIGRIYPGDGDTKYNGKFKGRATLSADKSKSIAYLQMNSLKTEDTAV |
| 3157 | | | YYCARRGTGGWYFDVWGQGTTVTVSS |
| SEQ ID | VH | E-H.26 | QVQLQESGPGLVKPSQTLSLTCTASGYAFSSSWMNWVRQPPGKGLE |
| NO: | | | WIGRIYPGDGDTKYNGKFKGRATLSADKSKSQASLKLSSVTAADTAV |
| 3158 | | | YYCARRGTGGWYFDVWGQGTTVTVSS |
| SEQ ID | VH | E-H.27 | QVQLQESGPGLVKPSGTLSLTCAASGYAFSSSWMNWVRQPPGKGLE |
| NO: | | | WIGRIYPGDGDTKYNGKFKGRATLSADKSKSQASLKLSSVTAADTAV |
| 3159 | | | YYCARRGTGGWYFDVWGQGTTVTVSS |
| SEQ ID | VH | E-H.28 | EVQLVESGGGLVKPGRSLRLSCTASGYAFSSSWMNWVRQAPGKGLE |
| NO: | | | WIGRIYPGDGDTKYNGKFKGRATLSADKSKSIAYLQMNSLKTEDTAV |
| 3160 | | | YYCARRGTGGWYFDVWGQGTTVTVSS |
| SEQ ID | VH | E-H.29 | EVQLVESGGGLVQPGGSLKLSCAASGYAFSSSWMNWVRQASGKGLE |
| NO: | | | WIGRIYPGDGDTKYNGKFKGRATLSADKSKSTAYLQMNSLKTEDTA |
| 3161 | | | VYYCARRGTGGWYFDVWGQGTTVTVSS |
| SEQ ID | VH | E-H.30 | QVQLQESGPGLVKPSQTLSLTCAASGYAFSSSWMNWVRQPPGKGLE |
| NO: | | | WIGRIYPGDGDTKYNGKFKGRATLSADKSKSQASLKLSSVTAADTAV |
| 3162 | | | YYCARRGTGGWYFDVWGQGTTVTVSS |
| SEQ ID | VH | E-H.31 | EVQLVESGGGLVKPGGSLRLSCAASGYAFSSSWMNWVRQAPGKGLE |
| NO: | | | WIGRIYPGDGDTKYNGKFKGRATLSADKSKSTAYLQMNSLKTEDTA |
| 3163 | | | VYYCARRGTGGWYFDVWGQGTTVTVSS |
| SEQ ID | VH | E-H.32 | EVQLVESGGALVKPGGSLRLSCAASGYAFSSSWMNWVRQAPGKGLE |
| NO: | | | WIGRIYPGDGDTKYNGKFKGRATLSADKSKSTAYLQMNSLKTEDTA |
| 3164 | | | VYYCARRGTGGWYFDVWGQGTTVTVSS |
| SEQ ID | VH | E-H.33 | QVQLQESGPGLVKPSQTLSLTCAAYGYAFSSSWMNWVRQPPGKGLE |
| NO: | | | WIGRIYPGDGDTKYNGKFKGRATLSADKSKSQASLKLSSVTAADTAV |
| 3165 | | | YYCARRGTGGWYFDVWGQGTTVTVSS |
| SEQ ID | VH | E-H.34 | QVQLQESGSGLVKPSQTLSLTCAASGYAFSSSWMNWVRQPPGKGLE |
| NO: | | | WIGRIYPGDGDTKYNGKFKGRATLSADKSKSQASLKLSSVTAADTAV |
| 3166 | | | YYCARRGTGGWYFDVWGQGTTVTVSS |
| SEQ ID | VH | E-H.35 | EVQLVESGGGLVQPGGSLRLSCAASGYAFSSSWMNWVRQAPGKGLE |
| NO: | | | WIGRIYPGDGDTKYNGKFKGRATLSADKSKSSAYLQMNSLKTEDTAV |
| 3167 | | | YYCARRGTGGWYFDVWGQGTTVTVSS |
| SEQ ID | VH | E-H.36 | QVQLQESGPGLVKPSDTLSLTCTASGYAFSSSWMNWVRQPPGKGLE |
| NO: | | | WIGRIYPGDGDTKYNGKFKGRATLSADKSKSQASLKLSSVTAADTAV |
| 3168 | | | YYCARRGTGGWYFDVWGQGTTVTVSS |
| SEQ ID | VH | E-H.37 | QVQLQESGPGLVKPSQTLSLTCTASGYAFSSSWMNWVRQHPGKGLE |
| NO: | | | WIGRIYPGDGDTKYNGKFKGRATLSADKSKSQASLKLSSVTAADTAV |
| 3169 | | | YYCARRGTGGWYFDVWGQGTTVTVSS |
| SEQ ID | VH | E-H.38 | QVQLQESGPGLVKPSQTLSLTCTASGYAFSSSWMNWVRQHPGKGLE |
| NO: | | | WIGRIYPGDGDTKYNGKFKGLATLSADKSKSQASLKLSSVTAADTAV |
| 3170 | | | YYCARRGTGGWYFDVWGQGTTVTVSS |
| SEQ ID | VH | E-H.39 | QVQLVESGGGVVQPGRSLRLSCAASGYAFSSSWMNWVRQAPGKGLE |
| NO: | | | WIGRIYPGDGDTKYNGKFKGRATLSADKSKSTAYLQMSSLRAEDTAV |
| 3171 | | | YYCARRGTGGWYFDVWGQGTTVTVSS |
| SEQ ID | VH | E-H.40 | QVQLVESGGGLVKPGGSLRLSCAASGYAFSSSWMNWVRQAPGKGLE |
| NO: | | | WIGRIYPGDGDTKYNGKFKGRATLSADKAKSSAYLQMNSLRAEDTA |
| 3172 | | | VYYCARRGTGGWYFDVWGQGTTVTVSS |
| SEQ ID | VH | E-H.41 | QVQLVESGGGLVQPGGSLRLSCSASGYAFSSSWMNWVRQAPGKGLE |
| NO: | | | WIGRIYPGDGDTKYNGKFKGRATLSADKSKSTAYLQMNSLRAEDTA |
| 3173 | | | VYYCARRGTGGWYFDVWGQGTTVTVSS |
| SEQ ID | VH | E-H.42 | QVQLLESGGGLVKPGGSLRLSCAASGYAFSSSWMNWVRQAPGKGLE |
| NO: | | | WIGRIYPGDGDTKYNGKFKGRATLSADKAKSSAYLQMNSLRAEDTA |
| 3174 | | | VYYCARRGTGGWYFDVWGQGTTVTVSS |
| SEQ ID | VH | E-H.43 | EVQLVESGGGLVQPGGSLRLSCSASGYAFSSSWMNWVRQAPGKGLE |
| NO: | | | WIGRIYPGDGDTKYNGKFKGRATLSADKSKSTAYLQMSSLRAEDTAV |
| 3175 | | | YYCARRGTGGWYFDVWGQGTTVTVSS |
| SEQ ID | VH | E-H.44 | QVQLQESGPGLVKPSDTLSLTCAASGYAFSSSWMNWVRQPPGKGLE |
| NO: | | | WIGRIYPGDGDTKYNGKFKGRATLSADKSKSQASLKLSSVTAVDTAV |
| 3176 | | | YYCARRGTGGWYFDVWGQGTTVTVSS |
| SEQ ID | VH | E-H.45 | QVQLQESGPGLVKPSQTLSLTCAASGYAFSSSWMNWVRQPPGKGLE |
| NO: | | | WIGRIYPGDGDTKYNGKFKGRATLSADKSKSQASLKLSSVTAVDTAV |
| 3177 | | | YYCARRGTGGWYFDVWGQGTTVTVSS |
| SEQ ID | VH | E-H.46 | EVQLVESGGGLVQPGGSLRLSCSASGYAFSSSWMNWVRQAPGKGLE |
| NO: | | | WIGRIYPGDGDTKYNGKFKGRATLSADKSKSTAYVQMSSLRAEDTA |
| 3178 | | | VYYCARRGTGGWYFDVWGQGTTVTVSS |
| SEQ ID | VH | E-H.47 | QVQLVDSGGGVVQPGRSLRLSCAASGYAFSSSWMNWVRQAPGKGLE |
| NO: | | | WIGRIYPGDGDTKYNGKFKGRATLSADKSKSTAYLQMNSLRAEDTA |
| 3179 | | | VYYCARRGTGGWYFDVWGQGTTVTVSS |
| SEQ ID | VH | E-H.48 | QVQLVESGGGVVQPGRSLRLSCAASGYAFSSSWMNWVRQAPGKGLE |
| NO: | | | WIGRIYPGDGDTKYNGKFKGRATLSADKSKSTAYLQMNSLRAEGTA |
| 3180 | | | VYYCARRGTGGWYFDVWGQGTTVTVSS |
| SEQ ID | VH | E-H.49 | QVQLVESGGGVVQPGRSLRLSCAASGYAFSSSWMNWVRQAPGKGLE |
| NO: | | | WIGRIYPGDGDTKYNGKFKGRATLSADKSKSTAYLQMNSLRAEDTA |
| 3181 | | | VYYCARRGTGGWYFDVWGQGTTVTVSS |
| SEQ ID | VH | E-H.50 | EVQLVESGGGLVQPGGSLRLSCAASGYAFSSSWMNWVRQAPGKGLE |
| NO: | | | WIGRIYPGDGDTKYNGKFKGRATLSADKSKSTAYLQMNSLRAEDTA |
| 3182 | | | VYYCARRGTGGWYFDVWGQGTTVTVSS |

[0458] In some embodiments, the anti-TCRβ V5 antibody molecule comprises a VH and/or a VL of an antibody described in Table 10A, or a sequence with at least 80%, 85%, 90%, 95%, 96%, 97%, 98%, 99% or more identity thereto.

[0459] In some embodiments, the anti-TCRβ V5 antibody molecule comprises a VH and a VL of an antibody described in Table 10A, or a sequence with at least 80%, 85%, 90%, 95%, 96%, 97%, 98%, 99% or more identity thereto.

[0460] In some embodiments, the anti-TCRβ V5 antibody molecule comprises a VH and/or a VL of an antibody described in Table 11A, or a sequence with at least 80%, 85%, 90%, 95%, 96%, 97%, 98%, 99% or more identity thereto.

[0461] In some embodiments, the anti-TCRβ V5 antibody molecule comprises a VH and a VL of an antibody described in Table 11A, or a sequence with at least 80%, 85%, 90%, 95%, 96%, 97%, 98%, 99% or more identity thereto.

### Anti-TCRβ V10 Antibodies

[0462] Accordingly, in one aspect, the disclosure provides an anti-TCRβV antibody molecule that binds to a human TCRβ V10 subfamily member. In some embodiments, TCRβ V10 subfamily is also known as TCRβ V12. In some embodiments, the TCRβ V10 subfamily comprises: TCRβ V10-1*01, TCRβ V10-1*02, TCRβ V10-3*01 or TCRβ V10-2*01, or a variant thereof.

[0463] Exemplary anti-TCRβ V10 antibodies of the disclosure are provided in Table 12A. In some embodiments, the anti-TCRβ V10 is antibody D, e.g., humanized antibody D (antibody D-H), as provided in Table 12A. In some embodiments, antibody D comprises one or more (e.g., three) light chain CDRs and/or one or more (e.g., three) heavy chain CDRs provided in Table 12A, or a sequence with at least 95 identity thereto. In some embodiments, antibody D comprises a variable heavy chain (VH) and/or a variable light chain (VL) provided in Table 12A, or a sequence with at least 95 identity thereto.

TABLE 12A
Amino acid sequences for anti TCRβ V10 antibodies
Amino acid and nucleotide sequences for murine and humanized antibody molecules which bind to TCRBV
10 (e.g., TCRBV 10-1, TCRBV 10-2 or TCRBV 10-3). The amino acid the heavy and light chain CDRs,
and the amino acid and nucleotide sequences of the heavy and light chain variable regions,
and the heavy and light chains are shown.
Murine antibody D, also referred to aSS511 antibody

| | | |
|---|---|---|
| SEQ ID NO: 1288 | HC CDR1 (Kabat) | SYGMS |
| SEQ ID NO: 1289 | HC CDR2 (Kabat) | LISSGGSYTYYTDSVKG |
| SEQ ID NO: 1290 | HC CDR3 (Kabat) | HGGNFFDY |
| SEQ ID NO: 1291 | HC CDR1 (Chothia) | GFTFRSY |
| SEQ ID NO: 1292 | HC CDR2 (Chothia) | SSGGSY |
| SEQ ID NO: 1290 | HC CDR3 (Chothia) | HGGNFFDY |
| SEQ ID NO: 1293 | HC CDR1 (Combined) | GFTFRSYGMS |
| SEQ ID NO: 1289 | HC CDR2 (Combined) | LISSGGSYTYYTDSVKG |
| SEQ ID NO: 1290 | HC CDR3 (Combined) | HGGNFFDY |
| SEQ ID NO: 1294 | LC CDR1 (Kabat) | SVSSSVSYMH |
| SEQ ID NO: 1295 | LC CDR2 (Kabat) | DTSKLAS |
| SEQ ID NO: 1296 | LC CDR3 (Kabat) | QQWSSNPQYT |
| SEQ ID NO: 1297 | LC CDR1 (Chothia) | SSSVSY |
| SEQ ID NO: 1295 | LC CDR2 (Chothia) | DTSKLAS |
| SEQ ID NO: 1296 | LC CDR3 (Chothia) | QQWSSNPQYT |
| SEQ ID NO: 1294 | LC CDR1 (Combined) | SVSSSVSYMH |
| SEQ ID NO: 1295 | LC CDR2 (Combined) | DTSKLAS |
| SEQ ID NO: 1296 | LC CDR3 (Combined) | QQWSSNPQYT |
| SEQ ID NO: 3183 | VH | EVQLVESGGDLVKPGGSLKLSCAVSGFTFRSYGMS |
| | | WVRQTPDKRLEWVALISSGGSYTYYTDSVKGRFTIS |
| | | RDNAKNTLYLQMSSLKSEDTAIYYCSRHGGNFFDY |
| | | WGQGTTLTVSS |
| SEQ ID NO: 3184 | VL | QIVLTQSPSIMSASPGEKVTMTCSVSSSVSYMHWYQ |
| | | QKSGTSPKRWIYDTSKLASGVPARFSGSGSGTSYSL |
| | | TISSMEAEDAATYYCQQWSSNPQYTFGQGTKLEIK |

Humanized antibody D (D-H antibody)
Variable light chain (VL)

| | | | |
|---|---|---|---|
| SEQ ID | VL | D-VL-H. 1 | DIVLTQSPAFLSVTPGEKVTITCSVSSSVSYMHWYQQKPDQAPK |
| NO: 3185 | | | LLIYDTSKLASGVPSRFSGSGSGTDYTFTISSLEAEDAATYYCQQ |
| | | | WSSNPQYTFGQGTKLEIK |
| SEQ ID | VL | D-VL-H.2 | AIQLTQSPSSLSASVGDRVTITCSVSSSVSYMHWYQQKPGKAPK |
| NO: 3186 | | | LLIYDTSKLASGVPSRFSGSGSGTDYTLTISSLQPEDFATYYCQQ |
| | | | WSSNPQYTFGQGTKLEIK |
| SEQ ID | VL | D-VL-H.3 | DIQLTQSPSFLSASVGDRVTITCSVSSSVSYMHWYQQKPGKAPK |
| NO: 3187 | | | LLIYDTSKLASGVPSRFSGSGSGTEYTLTISSLQPEDFATYYCQQ |
| | | | WSSNPQYTFGQGTKLEIK |
| SEQ ID | VL | D-VL-H.4 | DIQLTQSPSSLSASVGDRVTITCSVSSSVSYMHWYQQKPGKAPK |
| NO: 3188 | | | LLIYDTSKLASGVPSRFSGSGSGTDYTLTISSLQPEDFATYYCQQ |
| | | | WSSNPQYTFGQGTKLEIK |
| SEQ ID | VL | D-VL-H.5 | DIQLTQSPSSVSASVGDRVTITCSVSSSVSYMHWYQQKPGKAPK |
| NO: 3189 | | | LLIYDTSKLASGVPSRFSGSGSGTDYTLTISSLQPEDFATYYCQQ |
| | | | WSSNPQYTFGQGTKLEIK |
| SEQ ID | VL | D-VL-H.6 | DIQLTQSPSSLSASVGDRVTITCSVSSSVSYMHWYQQKPGKVPK |
| NO: 3190 | | | LLIYDTSKLASGVPSRFSGSGSGTDYTLTISSLQPEDVATYYCQQ |
| | | | WSSNPQYTFGQGTKLEIK |
| SEQ ID | VL | D-VL-H.7 | DIQLTQSPSSLSASVGDRVTITCSVSSSVSYMHWYQQKPGQAPK |
| NO: 3191 | | | LLIYDTSKLASGVPSRFSGSGSGTDYTLTISSLQPEDVATYYCQQ |
| | | | WSSNPQYTFGQGTKLEIK |
| SEQ ID | VL | D-VL-H.8 | EIVLTQSPDFQSVTPKEKVTITCSVSSSVSYMHWYQQKPDQSPK |
| NO: 338 | | | LLIYDTSKLASGVPSRFSGSGSGTDYTLTINSLEAEDAATYYCQQ |
| | | | WSSNPQYTFGQGTKLEIK |
| SEQ ID | VL | D-VL-H.9 | AIRLTQSPFSLSASVGDRVTITCSVSSSVSYMHWYQQKPAKAPK |
| NO: 339 | | | LFIYDTSKLASGVPSRFSGSGSGTDYTLTISSLQPEDFATYYCQQ |
| | | | WSSNPQYTFGQGTKLEIK |
| SEQ ID | VL | D-VL-H.10 | DIQLTQSPSSLSASVGDRVTITCSVSSSVSYMHWYQQKPGKAPK |
| NO: 340 | | | LLIYDTSKLASGVPSRFSGSGSGTDYTFTISSLQPEDIATYYCQQ |
| | | | WSSNPQYTFGQGTKLEIK |
| SEQ ID | VL | D-VL-H.1l | EIVLTQSPATLSLSPGERATLSCSVSSSVSYMHWYQQKPGQAPK |
| NO: 341 | | | LLIYDTSKLASGIPARFSGSGSGTDYTLTISSLEPEDFAVYYCQQ |
| | | | WSSNPQYTFGQGTKLEIK |
| SEQ ID | VL | D-VL-H.12 | DIQLTQSPSTLSASVGDRVTITCSVSSSVSYMHWYQQKPGKAPK |
| NO: 342 | | | LLIYDTSKLASGVPSRFSGSGSGTEYTLTISSLQPDDFATYYCQQ |
| | | | WSSNPQYTFGQGTKLEIK |
| SEQ ID | VL | D-VL-H.13 | DIQLTQSPSSLSASVGDRVTITCSVSSSVSYMHWYQQKPGKTPK |
| NO: 343 | | | LLIYDTSKLASGIPSRFSGSGSGTDYTLTIRSLQPEDFATYYCQQ |
| | | | WSSNPQYTFGQGTKLEIK |
| SEQ ID | VL | D-VL-H.14 | EIVLTQSPPTLSLSPGERVTLSCSVSSSVSYMHWYQQKPGQAPK |
| NO: 344 | | | LLIYDTSKLASGIPARFSGSGSGTDYTLTISSLQPEDFAVYYCQQ |
| | | | WSSNPQYTFGQGTKLEIK |
| SEQ ID | VL | D-VL-H.15 | DIQLTQSPSSLSASVGDRVTITCSVSSSVSYMHWYQQKPGKAPK |
| NO: 345 | | | RLIYDTSKLASGVPSRFSGSGSGTEYTLTISSLQPEDFATYYCQQ |
| | | | WSSNPQYTFGQGTKLEIK |
| SEQ ID | VL | D-VL-H.16 | EIVLTQSPATLSLSPGERATLSCSVSSSVSYMHWYQQKPGQAPK |
| NO: 3200 | | | LLIYDTSKLASGIPARFSGSGPGTDYTLTISSLEPEDFAVYYCQQ |
| | | | WSSNPQYTFGQGTKLEIK |
| SEQ ID | VL | D-VL-H.17 | EIVLTQSPATLSLSPGERATLSCSVSSSVSYMHWYQQKPGQAPK |
| NO: 3201 | | | LLIYDTSKLASGIPARFSGSGSGTDYTLTISRLEPEDFAVYYCQQ |
| | | | WSSNPQYTFGQGTKLEIK |
| SEQ ID | VL | D-VL-H.18 | EIVLTQSPATLSLSPGERATLSCSVSSSVSYMHWYQQKPGQAPK |
| NO: 3202 | | | LLIYDTSKLASGIPARFSGSGSGTDYTLTISSLQPEDFAVYYCQQ |
| | | | WSSNPQYTFGQGTKLEIK |
| SEQ ID | VL | D-VL-H.19 | EIVLTQSPATLSVSPGERATLSCSVSSSVSYMHWYQQKPGQAPK |
| NO: 3203 | | | LLIYDTSKLASGIPARFSGSGSGTEYTLTISSLQSEDFAVYYCQQ |
| | | | WSSNPQYTFGQGTKLEIK |
| SEQ ID | VL | D-VL-H.20 | EIVLTQSPATLSVSPGERATLSCSVSSSVSYMHWYQQKPGQAPK |
| NO: 3204 | | | LLIYDTSKLASGIPARFSGSGSGTEYTLTISILQSEDFAVYYCQQW |
| | | | SSNPQYTFGQGTKLEIK |
| SEQ ID | VL | D-VL-H.21 | EIVLTQSPPTLSLSPGERVTLSCSVSSSVSYMHWYQQKPGQAPK |
| NO: 3205 | | | LLIYDTSKLASSIPARFSGSGSGTDYTLTISSLQPEDFAVYYCQQ |
| | | | WSSNPQYTFGQGTKLEIK |
| SEQ ID | VL | D-VL-H.22 | DIQLTQSPSSLSASVGDRVTITCSVSSSVSYMHWYQQKPGKAPK |
| NO: 3206 | | | SLIYDTSKLASGVPSRFSGSGSGTDYTLTISSLQPEDFATYYCQQ |
| | | | WSSNPQYTFGQGTKLEIK |
| SEQ ID | VL | D-VL-H.23 | DIQLTQSPSSLSASVGDRVTITCSVSSSVSYMHWYQQKPGKAPK |
| NO: 3207 | | | RLIYDTSKLASGVPSRFSGSGSGTEYTLTISNLQPEDFATYYCQQ |
| | | | WSSNPQYTFGQGTKLEIK |
| SEQ ID | VL | D-VL-H.24 | DIQLTQSPSAMSASVGDRVTITCSVSSSVSYMHWYQQKPGKVP |
| NO: 3208 | | | KRLIYDTSKLASGVPSRFSGSGSGTEYTLTISSLQPEDFATYYCQ |
| | | | QWSSNPQYTFGQGTKLEIK |
| SEQ ID | VL | D-VL-H.25 | EIVLTQSPATLSLSPGERATLSCSVSSSVSYMHWYQQKPGQAPK |
| NO: 3209 | | | LLIYDTSKLASGIPDRFSGSGSGTDYTLTISRLEPEDFAVYYCQQ |
| | | | WSSNPQYTFGQGTKLEIK |
| SEQ ID | VL | D-VL-H.26 | EIVLTQSPATLSLSPGERATLSCSVSSSVSYMHWYQQKPGLAPK |
| NO: 3210 | | | LLIYDTSKLASGIPDRFSGSGSGTDYTLTISRLEPEDFAVYYCQQ |
| | | | WSSNPQYTFGQGTKLEIK |
| SEQ ID | VL | D-VL-H.27 | EIVLTQSPGTLSLSPGERATLSCSVSSSVSYMHWYQQKPGQAPK |
| NO: 3211 | | | LLIYDTSKLASGIPDRFSGSGSGTDYTLTISRLEPEDFAVYYCQQ |
| | | | WSSNPQYTFGQGTKLEIK |
| SEQ ID | VL | D-VL-H.28 | DIQLTQSPSSLSASVGDRVTITCSVSSSVSYMHWYQQKPGKAPK |
| NO: 3212 | | | SLIYDTSKLASGVPSKFSGSGSGTDYTLTISSLQPEDFATYYCQQ |
| | | | WSSNPQYTFGQGTKLEIK |
| SEQ ID | VL | D-VL-H.29 | DIQLTQSPSSLSASVGDRVTITCSVSSSVSYMHWYQQKPEKAPK |
| NO: 3213 | | | SLIYDTSKLASGVPSRFSGSGSGTDYTLTISSLQPEDFATYYCQQ |
| | | | WSSNPQYTFGQGTKLEIK |
| SEQ ID | VL | D-VL-H.30 | DIVLTQSPDSLAVSLGERATINCSVSSSVSYMHWYQQKPGQPPK |
| NO: 3214 | | | LLIYDTSKLASGVPDRFSGSGSGTDYTLTISSLQAEDVAVYYCQ |
| | | | QWSSNPQYTFGQGTKLEIK |
| SEQ ID | VL | D-VL-H.31 | EIVLTQTPLSLSITPGEQASMSCSVSSSVSYMHWYLQKARPVPKL |
| NO: 3215 | | | LIYDTSKLASGVPDRFSGSGSGTDYTLKISRVEAEDFGVYYCQQ |
| | | | WSSNPQYTFGQGTKLEIK |
| SEQ ID | VL | D-VL-H.32 | EIVLTQTPLSLSITPGEQASISCSVSSSVSYMHWYLQKARPVPKL |
| NO: 3216 | | | LIYDTSKLASGVPDRFSGSGSGTDYTLKISRVEAEDFGVYYCQQ |
| | | | WSSNPQYTFGQGTKLEIK |
| SEQ ID | VL | D-VL-H.33 | DIVLTQSPLSLPVTPGEPASISCSVSSSVSYMHWYLQKPGQSPKL |
| NO: 3217 | | | LIYDTSKLASGVPDRFSGSGSGTDYTLKISRVEAEDVGVYYCQQ |
| | | | WSSNPQYTFGQGTKLEIK |
| SEQ ID | VL | D-VL-H.34 | DIVLTQSPLSLPVTLGQPASISCSVSSSVSYMHWYQQRPGQSPKR |
| NO: 3218 | | | LIYDTSKLASGVPDRFSGSGSGTDYTLKISRVEAEDVGVYYCQQ |
| | | | WSSNPQYTFGQGTKLEIK |
| SEQ ID | VL | D-VL-H.35 | DIVLTQTPLSLPVTPGEPASISCSVSSSVSYMHWYLQKPGQSPKL |
| NO: 3219 | | | LIYDTSKLASGVPDRFSGSGSGTDYTLKISRVEAEDVGVYYCQQ |
| | | | WSSNPQYTFGQGTKLEIK |
| SEQ ID | VL | D-VL-H.36 | DIVLTQTPLSLSVTPGQPASISCSVSSSVSYMHWYLQKPGQSPKL |
| NO: 3220 | | | LIYDTSKLASGVPDRFSGSGSGTDYTLKISRVEAEDVGVYYCQQ |
| | | | WSSNPQYTFGQGTKLEIK |
| SEQ ID | VL | D-VL-H.37 | DIVLTQTPLSLSVTPGQPASISCSVSSSVSYMHWYLQKPGQPPKL |
| NO: 3221 | | | LIYDTSKLASGVPDRFSGSGSGTDYTLKISRVEAEDVGVYYCQQ |
| | | | WSSNPQYTFGQGTKLEIK |
| SEQ ID | VL | D-VL-H.38 | DIQLIQSPSFLSASVGDRVSIICSVSSSVSYMHWYLQKPGKSPKLF |
| NO: 3222 | | | IYDTSKLASGVSSRFSGRGSGTDYTLTIISLKPEDFAAYYCQQWS |
| | | | SNPQYTFGQGTKLEIK |
| SEQ ID | VL | D-VL-H.39 | DIVLTQTPLSSPVTLGQPASISCSVSSSVSYMHWYQQRPGQPPKL |
| NO: 3223 | | | LIYDTSKLASGVPDRFSGSGAGTDYTLKISRVEAEDVGVYYCQQ |
| | | | WSSNPQYTFGQGTKLEIK |
| SEQ ID | VL | D-VL-H.40 | EITLTQSPAFMSATPGDKVNISCSVSSSVSYMHWYQQKPGEAPK |
| NO: 3224 | | | FIIYDTSKLASGIPPRFSGSGYGTDYTLTINNIESEDAAYYYCQQ |
| | | | WSSNPQYTFGQGTKLEIK |

Variable HEAVY chain (VH)

| | | | |
|---|---|---|---|
| SEQ ID | VH | D-VH-H.1 | EVQLVESGGGLVKPGGSLRLSCAVSGFTFRSYGMSWVRQAPGK |
| NO: 3225 | | | GLEWVALISSGGSYTYYTDSVKGRFTISRDNSKNTLYLQMNSLK |
| | | | TEDTAVYYCSRHGGNFFDYWGQGTTVTVSS |
| SEQ ID | VH | D-VH-H.2 | EVQLVESGGALVKPGGSLRLSCAVSGFTFRSYGMSWVRQAPGK |
| NO: 3226 | | | GLEWVALISSGGSYTYYTDSVKGRFTISRDNSKNTLYLQMNSLK |
| | | | TEDTAVYYCSRHGGNFFDYWGQGTTVTVSS |
| SEQ ID | VH | D-VH-H.3 | EVQLVESGGGLVQPGGSLRLSCAVSGFTFRSYGMSWVRQAPGK |
| NO: 3227 | | | GLEWVALISSGGSYTYYTDSVKGRFTISRDNAKNTLYLQMNSL |
| | | | RAEDTAVYYCSRHGGNFFDYWGQGTTVTVSS |
| SEQ ID | VH | D-VH-H.4 | EVQLVESGGGLVQPGGSLRLSCAVSGFTFRSYGMSWVRQAPGK |
| NO: 3228 | | | GLEWVALISSGGSYTYYTDSVKGRFTISRDNAKNSLYLQMNSLR |
| | | | AEDTAVYYCSRHGGNFFDYWGQGTTVTVSS |
| SEQ ID | VH | D-VH-H.5 | EVQLVESGGGLVQPGGSLRLSCAVSGFTFRSYGMSWVRQAPGK |
| NO: 3229 | | | GLEWVALISSGGSYTYYTDSVKGRFTISRDNSKNSLYLQMNSLK |
| | | | TEDTAVYYCSRHGGNFFDYWGQGTTVTVSS |
| SEQ ID | VH | D-VH-H.6 | EVQLVESGGGLVQPGGSLRLSCAVSGFTFRSYGMSWVRQAPGK |
| NO: 3230 | | | GLEWVALISSGGSYTYYTDSVKGRFTISRDNAKNSLYLQMNSLR |
| | | | AEDMAVYYCSRHGGNFFDYWGQGTTVTVSS |
| SEQ ID | VH | D-VH-H.7 | EVQLVESGGGLVQPGGSLRLSCAVSGFTFRSYGMSWVRQAPGK |
| NO: 3231 | | | GLEWVALISSGGSYTYYTDSVKGQFTISRDNAKNTLYLQMNSL |
| | | | RAEDMAVYYCSRHGGNFFDYWGQGTTVTVSS |
| SEQ ID | VH | D-VH-H.8 | EVQLVESGGGLVKPGRSLRLSCTVSGFTFRSYGMSWVRQAPGK |
| NO: 3232 | | | GLEWVALISSGGSYTYYTDSVKGRFTISRDNSKNILYLQMNSLK |
| | | | TEDTAVYYCSRHGGNFFDYWGQGTTVTVSS |
| SEQ ID | VH | D-VH-H.9 | EVQLVESGGGLVKPGGSLRLSCAVSGFTFRSYGMSWVRQAPGK |
| NO: 3233 | | | GLEWVALISSGGSYTYYTDSVKGRFTISRDNAKNSLYLQMNSLR |
| | | | AEDTAVYYCSRHGGNFFDYWGQGTTVTVSS |
| SEQ ID | VH | D-VH-H.10 | EVQLVESGGGLVQPGGSLKLSCAVSGFTFRSYGMSWVRQASGK |
| NO: 3234 | | | GLEWVALISSGGSYTYYTDSVKGRFTISRDNSKNTLYLQMNSLK |
| | | | TEDTAVYYCSRHGGNFFDYWGQGTTVTVSS |
| SEQ ID | VH | D-VH-H.11 | QVQLVESGGGVVQPGGSLRLSCAVSGFTFRSYGMSWVRQAPG |
| NO: 3235 | | | KGLEWVALISSGGSYTYYTDSVKGRFTISRDNSKNTLYLQMNSL |
| | | | RAEDTAVYYCSRHGGNFFDYWGQGTTVTVSS |
| SEQ ID | VH | D-VH-H.12 | QVQLVESGGGVVQPGRSLRLSCAVSGFTFRSYGMSWVRQAPG |
| NO: 3236 | | | KGLEWVALISSGGSYTYYTDSVKGRFTISRDNSKNTLYLQMSSL |
| | | | RAEDTAVYYCSRHGGNFFDYWGQGTTVTVSS |
| SEQ ID | VH | D-VH-H.13 | EVQLVESGGGLVQPGGSLRLSCPVSGFTFRSYGMSWVRQAPGK |
| NO: 3237 | | | GLEWVALISSGGSYTYYTDSVKGRFTISRDNANNSLYLQMNSLR |
| | | | AEDTAVYYCSRHGGNFFDYWGQGTTVTVSS |
| SEQ ID | VH | D-VH-H.14 | EVQLVESGGGLVQPGRSLRLSCTVSGFTFRSYGMSWVRQAPGK |
| NO: 3238 | | | GLEWVALISSGGSYTYYTDSVKGRFTISRDNSKNILYLQMNSLK |
| | | | TEDTAVYYCSRHGGNFFDYWGQGTTVTVSS |
| SEQ ID | VH | D-VH-H.15 | EVQLVESGGGLVQPGPSLRLSCTVSGFTFRSYGMSWVRQAPGK |
| NO: 3239 | | | GLEWVALISSGGSYTYYTDSVKGRFTISRDNSKNILYLQMNSLK |
| | | | TEDTAVYYCSRHGGNFFDYWGQGTTVTVSS |
| SEQ ID | VH | D-VH-H.16 | EVQLVESGGGLVQPGGSLRLSCAVSGFTFRSYGMSWVRQAPGK |
| NO: 3240 | | | GLEWVALISSGGSYTYYTDSVKGRFTISRDNSKNTLYLQMNSLR |
| | | | AEDTAVYYCSRHGGNFFDYWGQGTTVTVSS |
| SEQ ID | VH | D-VH-H.17 | EVQLVESGGGLVQPGGSLRLSCAVSGFTFRSYGMSWVRQAPGK |
| NO: 3241 | | | GLEWVALISSGGSYTYYTDSVKGRFTISRDNAKNSLYLQMNSLR |
| | | | DEDTAVYYCSRHGGNFFDYWGQGTTVTVSS |
| SEQ ID | VH | D-VH-H.18 | QVQLVESGGGLVKPGGSLRLSCAVSGFTFRSYGMSWVRQAPGK |
| NO: 3242 | | | GLEWVALISSGGSYTYYTDSVKGRFTISRDNAKNSLYLQMNSLR |
| | | | AEDTAVYYCSRHGGNFFDYWGQGTTVTVSS |
| SEQ ID | VH | D-VH-H.19 | QVQLVESGGGVVQPGRSLRLSCAVSGFTFRSYGMSWVRQAPG |
| NO: 3243 | | | KGLEWVALISSGGSYTYYTDSVKGRFTISRDNSKNTLYLQMNSL |
| | | | RAEDTAVYYCSRHGGNFFDYWGQGTTVTVSS |
| SEQ ID | VH | D-VH-H.20 | EVQLLESGGGLVQPGGSLRLSCAVSGFTFRSYGMSWVRQAPGK |
| NO: 3244 | | | GLEWVALISSGGSYTYYTDSVKGRFTISRDNSKNTLYLQMNSLR |
| | | | AEDTAVYYCSRHGGNFFDYWGQGTTVTVSS |
| SEQ ID | VH | D-VH-H.21 | EVQLVESGGGLVQPGGSLRLSCAVSGFTFRSYGMSWVRQAPGK |
| NO: 3245 | | | GLEWVALISSGGSYTYYTDSVKGRFTISRHNSKNTLYLQMNSLR |
| | | | AEDTAVYYCSRHGGNFFDYWGQGTTVTVSS |
| SEQ ID | VH | D-VH-H.22 | EVQLVESGGGLIQPGGSLRLSCAVSGFTFRSYGMSWVRQPPGK |
| NO: 3246 | | | GLEWVALISSGGSYTYYTDSVKGRFTISRDNSKNTLYLQMNSLR |
| | | | AEDTAVYYCSRHGGNFFDYWGQGTTVTVSS |
| SEQ ID | VH | D-VH-H.23 | EVQLVESGGGLIQPGGSLRLSCAVSGFTFRSYGMSWVRQAPGK |
| NO: 3247 | | | GLEWVALISSGGSYTYYTDSVKGRFTISRDNSKNTLYLQMNSLR |
| | | | AEDTAVYYCSRHGGNFFDYWGQGTTVTVSS |
| SEQ ID | VH | D-VH-H.24 | EVQLVESGGGLVQPGRSLRLSCAVSGFTFRSYGMSWVRQAPGK |
| NO: 3248 | | | GLEWVALISSGGSYTYYTDSVKGRFTISRDNAKNSLYLQMNSLR |
| | | | AEDTALYYCSRHGGNFFDYWGQGTTVTVSS |
| SEQ ID | VH | D-VH-H.25 | QVQLVESGGGVVQPGRSLRLSCAVSGFTFRSYGMSWVRQAPG |
| NO: 3249 | | | KGLEWVALISSGGSYTYYTDSVKGRFTISRDNSKNRLYLQMNSL |
| | | | RAEDTAVYYCSRHGGNFFDYWGQGTTVTVSS |
| SEQ ID | VH | D-VH-H.26 | QVQLVESGGGVVQPGRSLRLSCAVSGFTFRSYGMSWVRQAPG |
| NO: 3250 | | | KGLEWVALISSGGSYTYYTDSVKGRFTISRDNSKNTLYLQMNSL |
| | | | RAEGTAVYYCSRHGGNFFDYWGQGTTVTVSS |
| SEQ ID | VH | D-VH-H.27 | QVQLVESGGGVVQPGRSLRLSCAVSGFTFRSYGMSWVRQAPG |
| NO: 3251 | | | KGLEWVALISSGGSYTYYTDSVKGRFAISRDNSKNTLYLQMNS |
| | | | LRAEDTAVYYCSRHGGNFFDYWGQGTTVTVSS |
| SEQ ID | VH | D-VH-H.28 | QVQLVDSGGGVVQPGRSLRLSCAVSGFTFRSYGMSWVRQAPG |
| NO: 3252 | | | KGLEWVALISSGGSYTYYTDSVKGRFTISRDNSKNTLYLQMNSL |
| | | | RAEDTAVYYCSRHGGNFFDYWGQGTTVTVSS |
| SEQ ID | VH | D-VH-H.29 | EVQLVESGGGVVRPGGSLRLSCAVSGFTFRSYGMSWVRQAPGK |
| NO: 3253 | | | GLEWVALISSGGSYTYYTDSVKGRFTISRDNAKNSLYLQMNSLR |
| | | | AEDTALYHCSRHGGNFFDYWGQGTTVTVSS |
| SEQ ID | VH | D-VH-H.30 | EVQLVESGGVVVQPGGSLRLSCAVSGFTFRSYGMSWVRQAPGK |
| NO: 3254 | | | GLEWVALISSGGSYTYYTDSVKGRFTISRDNSKNSLYLQMNSLR |
| | | | AEDTALYYCSRHGGNFFDYWGQGTTVTVSS |
| SEQ ID | VH | D-VH-H.31 | EVQLVESGGGVVQPGGSLRLSCAVSGFTFRSYGMSWVRQAPGK |
| NO: 3255 | | | GLEWVALISSGGSYTYYTDSVKGRFTISRDNSKNSLYLQMNSLR |
| | | | TEDTALYYCSRHGGNFFDYWGQGTTVTVSS |
| SEQ ID | VH | D-VH-H.32 | EVQLVESGGVVVQPGGSLRLSCAVSGFTFRSYGMSWVRQAPGK |
| NO: 3256 | | | GLEWVALISSGGSYTYYTDSVKGRFTISRDNSKNSLYLQMNSLR |
| | | | TEDTALYYCSRHGGNFFDYWGQGTTVTVSS |
| SEQ ID | VH | D-VH-H.33 | EVQLVETGGGLIQPGGSLRLSCAVSGFTFRSYGMSWVRQAPGK |
| NO: 3257 | | | GLEWVALISSGGSYTYYTDSVKGRFTISRDNSKNTLYLQMNSLR |
| | | | AEDTAVYYCSRHGGNFFDYWGQGTTVTVSS |
| SEQ ID | VH | D-VH-H.34 | EVQLVESGGGLVQPGGSLRLSCAVSGFTFRSYGMSWVRQATGK |
| NO: 3258 | | | GLEWVALISSGGSYTYYTDSVKGRFTISRENAKNSLYLQMNSLR |
| | | | AGDTAVYYCSRHGGNFFDYWGQGTTVTVSS |
| SEQ ID | VH | D-VH-H.35 | EVQLVESRGVLVQPGGSLRLSCAVSGFTFRSYGMSWVRQAPGK |
| NO: 3259 | | | GLEWVALISSGGSYTYYTDSVKGRFTISRDNSKNTLHLQMNSLR |
| | | | AEDTAVYYCSRHGGNFFDYWGQGTTVTVSS |
| SEQ ID | VH | D-VH-H.36 | EVQLVESGGGLVQPGRSLRLSCAVSGFTFRSYGMSWVRQAPGK |
| NO: 3260 | | | GLEWVALISSGGSYTYYTDSVKGRFTISRDNAKNSLYLQMNSLR |
| | | | AEDMALYYCSRHGGNFFDYWGQGTTVTVSS |
| SEQ ID | VH | D-VH-H.37 | QVQLVESGGGLVQPGGSLRLSCSVSGFTFRSYGMSWVRQAPGK |
| NO: 3261 | | | GLEWVALISSGGSYTYYTDSVKGRFTISRDNSKNTLYLQMNSLR |
| | | | AEDTAVYYCSRHGGNFFDYWGQGTTVTVSS |
| SEQ ID | VH | D-VH-H.38 | EVQLVESGGGLVQPGGSLRLSCSVSGFTFRSYGMSWVRQAPGK |
| NO: 3262 | | | GLEWVALISSGGSYTYYTDSVKGRFTISRDNSKNTLYLQMSSLR |
| | | | AEDTAVYYCSRHGGNFFDYWGQGTTVTVSS |
| SEQ ID | VH | D-VH-H.39 | QVQLVESGGGVVQPGRSLRLSCAVSGFTFRSYGMSWVRQAPG |
| NO: 3263 | | | KGLEWVALISSGGSYTYYTDSVKGRFTISRDNSTNTLFLQMNSL |
| | | | RAEDTAVYYCSRHGGNFFDYWGQGTTVTVSS |
| SEQ ID | VH | D-VH-H.40 | QVQLLESGGGLVKPGGSLRLSCAVSGFTFRSYGMSWVRQAPGK |
| NO: 3264 | | | GLEWVALISSGGSYTYYTDSVKGRFTISRDNAKNSLYLQMNSLR |
| | | | AEDTAVYYCSRHGGNFFDYWGQGTTVTVSS |
| SEQ ID | VH | D-VH-H.41 | EVQLVESGEGLVQPGGSLRLSCAVSGFTFRSYGMSWVRQAPGK |
| NO: 3265 | | | GLEWVALISSGGSYTYYTDSVKGRFTISRDNSKNTLYLQMGSLR |
| | | | AEDMAVYYCSRHGGNFFDYWGQGTTVTVSS |
| SEQ ID | VH | D-VH-H.42 | EVQLVESGGGLVQPGGSLRLSCAVSGFTFRSYGMSWVRQAPGK |
| NO: 3266 | | | GLEWVALISSGGSYTYYTDSVKGRFTISRDNSKNTLYLQMGSLR |
| | | | AEDMAVYYCSRHGGNFFDYWGQGTTVTVSS |
| SEQ ID | VH | D-VH-H.43 | EVQLVESGGGLVQPGGSLRLSCSVSGFTFRSYGMSWVRQAPGK |
| NO: 3267 | | | GLEWVALISSGGSYTYYTDSVKGRFTISRDNSKNTLYVQMSSLR |
| | | | AEDTAVYYCSRHGGNFFDYWGQGTTVTVSS |
| SEQ ID | VH | D-VH-H.44 | EVQLVESGGGLVQPGGSLRLSCAVSGFTFRSYGMSWVRQAPGK |
| NO: 3268 | | | GLEWVALISSGGSYTYYTDSVKGRFIISRDNSRNSLYLQKNRRR |
| | | | AEDMAVYYCSRHGGNFFDYWGQGTTVTVSS |
| SEQ ID | VH | D-VH-H.45 | EVQLVESGGGLVQPGGSLRLSCAVSGFTFRSYGMSWVHQAPGK |
| NO: 3269 | | | GLEWVALISSGGSYTYYTDSVKGRFIISRDNSRNTLYLQTNSLRA |
| | | | EDTAVYYCSRHGGNFFDYWGQGTTVTVSS |
| SEQ ID | VH | D-VH-H.46 | EVHLVESGGGLVQPGGALRLSCAVSGFTFRSYGMSWVRQATG |
| NO: 3270 | | | KGLEWVALISSGGSYTYYTDSVKGRFTISRENAKNSLYLQMNSL |
| | | | RAGDTAVYYCSRHGGNFFDYWGQGTTVTVSS |
| SEQ ID | VH | D-VH-H.47 | EVQLVESGGGLVQPRGSLRLSCAVSGFTFRSYGMSWVRQAPGK |
| NO: 3271 | | | GLEWVALISSGGSYTYYTDSVKGRFTISRDNSKNTLYLQMNNL |
| | | | RAEGTAVYYCSRHGGNFFDYWGQGTTVTVSS |
| SEQ ID | VH | D-VH-H.48 | EVQLVESGGGLVQPRGSLRLSCAVSGFTFRSYGMSWVRQAPGK |
| NO: 3272 | | | GLEWVALISSGGSYTYYTDSVKGRFTISRDNSKNTLYLQMNNL |
| | | | RAEGTAAYYCSRHGGNFFDYWGQGTTVTVSS |
| SEQ ID | VH | D-VH-H.49 | QVQLVQSGAEVKKPGASVKVSCKVSGFTFRSYGMSWVRQAPG |
| NO: 3273 | | | KGLEWVALISSGGSYTYYTDSVKGRFTITRDNSTNTLYMELSSL |
| | | | RSEDTAVYYCSRHGGNFFDYWGQGTTVTVSS |
| SEQ ID | VH | D-VH-H.50 | QVQLVQSGSELKKPGASVKVSCKVSGFTFRSYGMSWVRQAPG |
| NO: 3274 | | | QGLEWVALISSGGSYTYYTDSVKGRFVISRDNSVNTLYLQISSL |
| | | | KAEDTAVYYCSRHGGNFFDYWGQGTTVTVSS |

[0464] In some embodiments, the anti-TCRβ V10 antibody molecule comprises a VH or a VL of an antibody described in Table 12A, or a sequence with at least 80%, 85%, 90%, 95%, 96%, 97%, 98%, 99% or more identity thereto.

[0465] In some embodiments, the anti-TCRβ V10 antibody molecule comprises a VH and a VL of an antibody described in Table 12A, or a sequence with at least 80%, 85%, 90%, 95%, 96%, 97%, 98%, 99% or more identity thereto.

### Additional Anti-TCRVβ Antibodies

[0466] Additional exemplary anti-TCRβV antibodies of the disclosure are provided in Table 13A. In some embodiments, the anti-TCRβV antibody is a humanized antibody, e.g., as provided in Table 13A. In some embodiments, the anti-TCRβV antibody comprises one or more (e.g., all three) of a LC CDR1, LC CDR2, and LC CDR3 provided in Table 13A; and/or one or more (e.g., all three) of a HC CDR1, HC CDR2, and HC CDR3 provided in Table 13A, or a sequence with at least 95% identity thereto. In some embodiments, the anti-TCRβV antibody comprises a variable heavy chain (VH) and/or a variable light chain (VL) provided in Table 13A, or a sequence with at least 95% identity thereto.

TABLE 13A
Amino acid sequences for additional anti-TCRβ V antibodies
Amino acid and nucleotide sequences for murine and humanized antibody
molecules which bind to various TCRVB families are disclosed. The
amino acid the heavy and light chain CDRs, and the amino acid and
nucleotide sequences of the heavy and light chain variable regions,
and the heavy and light chains are shown. Antibodies disclosed in
the table include, MPB2D5, CAS 1.1.3, IMMU222, REA1062, JOVI-3,
IMMU546 and MR5-2. MPB2D5 binds human TCRβV 20-1 (TCRβV2 per old
nomenclature). CAS 1.1.3 binds human TCRβV 27 (TCRβV 14 per old
nomenclature). IMMU 222 binds human TCRβV 6-5, TCRβV 6-6, or TCRβV
6-9 (TCRβV13.1 per old nomenclature). REA1062 binds human TCRβV 5-1).
JOVI-3 binds human TCRβV 28 (TCRβV3.1 per old nomenclature). IMMU546
binds human TCRβV 2. MR5-2 binds human TCRVβ 13-2.
MPB2D5 (murine), also referred to here as BJ1188, BJ1190 and REA654;
or Antibody G Binds to human TCRVβ 20-1

| | | |
|---|---|---|
| SEQ ID NO: 1102 | HC CDR1 (Kabat) | SAYMH |
| SEQ ID NO: 1103 | HC CDR2 (Kabat) | RIDPATGKTKYAPKFQA |
| SEQ ID NO: 1104 | HC CDR3 (Kabat) | SLNWDYGLDY |
| SEQ ID NO: 1105 | HC CDR1 (Chothia) | GFNIKSA |
| SEQ ID NO: 1106 | HC CDR2 (Chothia) | DPATGK |
| SEQ ID NO: 1104 | HC CDR3 (Chothia) | SLNWDYGLDY |
| SEQ ID NO: 1107 | HC CDR1 (Combined) | GFNIKSAYMH |
| SEQ ID NO: 1103 | HC CDR2 (Combined) | RIDPATGKTKYAPKFQA |
| SEQ ID NO: 1104 | HC CDR3 (Combined) | SLNWDYGLDY |
| SEQ ID NO: 263 | LC CDR1 (Kabat) | RASKSVSILGTHLIH |
| SEQ ID NO: 1108 | LC CDR2 (Kabat) | AASNLES |
| SEQ ID NO: 1109 | LC CDR3 (Kabat) | QQSIEDPWT |
| SEQ ID NO: 1110 | LC CDR1 (Chothia) | SKSVSILGTHL |
| SEQ ID NO: 1108 | LC CDR2 (Chothia) | AASNLES |
| SEQ ID NO: 1109 | LC CDR3 (Chothia) | QQSIEDPWT |
| SEQ ID NO: 263 | LC CDR1 (Combined) | RASKSVSILGTHLIH |
| SEQ ID NO: 1108 | LC CDR2 (Combined) | AASNLES |
| SEQ ID NO: 1109 | LC CDR3 (Combined) | QQSIEDPWT |
| SEQ ID NO: 1111 | VL | DIVLTQSPASLAVSLGQRATISCRASKSVSILGTHLIHWY |
| | | QQKPGQPPKLLIYAASNLESGVPARFSGSGSETVFTLNI |
| | | HPVEEEDAATYFCQQSIEDPWTFGGGTKLGIK |
| SEQ ID NO: 1112 | VH | EVQLQQSVADLVRPGASLKLSCTASGFNIKSAYMHWVI |
| | | QRPDQGPECLGRIDPATGKTKYAPKFQAKATITADTSS |
| | | NTAYLQLSSLTSEDTAIYYCTRSLNWDYGLDYWGQGT |
| | | SVTVSS |

VH for MPB2D5 (humanized) also referred to as Antibody G-H (humanized)
Binds to human TCRVβ 20-1

| | | |
|---|---|---|
| SEQ ID NO: 1113 | VH-1 | QVQLVQSGAEVKKPGASVKVSCKASGFNIKSAYMHW |
| | | VRQAPGQGLEWMGRIDPATGKTKYAPKFQARVTMTA |
| | | DTSTNTAYMELSSLRSEDTAVYYCARSLNWDYGLDYW |
| | | GQGTLVTVSS |
| SEQ ID NO: 1114 | VH-2 | QVQLVQSGAEVKKPGASVKVSCKASGFNIKSAYMHW |
| | | VRQAPGQEPGCMGRIDPATGKTKYAPKFQARVTMTAD |
| | | TSINTAYTELSSLRSEDTATYYCARSLNWDYGLDYWG |
| | | QGTLVTVSS |
| SEQ ID NO: 1115 | VH-3 | QVQLVQSGAEVKKPGSSVKVSCKASGFNIKSAYMHWV |
| | | RQAPGQGLEWMGRIDPATGKTKYAPKFQARVTITADT |
| | | STNTAYMELSSLRSEDTAVYYCARSLNWDYGLDYWG |
| | | QGTLVTVSS |
| SEQ ID NO: 1116 | VH-4 | QVQLVQSGAEVKKPGASVKVSCKASGFNIKSAYMHW |
| | | VRQAPGQRLEWMGRIDPATGKTKYAPKFQARVTITAD |
| | | TSANTAYMELSSLRSEDTAVYYCARSLNWDYGLDYW |
| | | GQGTLVTVSS |

VL for MPB2D5 (humanized) also referred to as Antibody G-H (humanized)
Binds to human TCRVβ 20-1

| | | |
|---|---|---|
| SEQ ID NO: 1117 | VL-1 | EIVLTQSPATLSLSPGERATLSCRASKSVSILGTHLIHWY |
| | | QQKPGQAPRLLIYAASNLESGIPARFSGSGSETDFTLTIS |
| | | SLEPEDFAVYFCQQSIEDPFGGGTKVEIK |
| SEQ ID NO: 1118 | VL-2 | EIVLTQSPATLSLSPGERATLSCRASKSVSILGTHLIHWY |
| | | QQKPGLAPRLLIYAASNLESGIPDRFSGSGSETDFTLTIS |
| | | RLEPEDFAVYFCQQSIEDPFGGGTKVEIK |
| SEQ ID NO: 1119 | VL-3 | EIVLTQSPGTLSLSPGERATLSCRASKSVSILGTHLIHWY |
| | | QQKPGQAPRLLIYAASNLESGIPDRFSGSGSETDFTLTIS |
| | | RLEPEDFAVYFCQQSIEDPFGGGTKVEIK |

CAS1.1.3 (murine) also referred to herein as BJ1460; or Antibody H
Binds to human TCRVβ 27

| | | |
|---|---|---|
| SEQ ID NO: 1120 | HC CDR1 (Kabat) | DTYMY |
| SEQ ID NO: 1121 | HC CDR2 (Kabat) | RIDPANGNTKYDPKFQD |
| SEQ ID NO: 1122 | HC CDR3 (Kabat) | GSYYYAMDY |
| SEQ ID NO: 1123 | HC CDR1 (Chothia) | GFKTEDT |
| SEQ ID NO: 1124 | HC CDR2 (Chothia) | DPANGN |
| SEQ ID NO: 1122 | HC CDR3 (Chothia) | GSYYYAMDY |
| SEQ ID NO: 1125 | HC CDR1 (Combined) | GFKTEDTYMY |
| SEQ ID NO: 1121 | HC CDR2 (Combined) | RIDPANGNTKYDPKFQD |
| SEQ ID NO: 1122 | HC CDR3 (Combined) | GSYYYAMDY |
| SEQ ID NO: 1126 | LC CDR1 (Kabat) | RASESVDSYGNSFMH |
| SEQ ID NO: 1127 | LC CDR2 (Kabat) | RASNLES |
| SEQ ID NO: 1128 | LC CDR3 (Kabat) | QQSNEDPYT |
| SEQ ID NO: 1126 | LC CDR1 (Chothia) | SESVDSYGNSF |
| SEQ ID NO: 1127 | LC CDR2 (Chothia) | RASNLES |
| SEQ ID NO: 1128 | LC CDR3 (Chothia) | QQSNEDPYT |
| SEQ ID NO: 1126 | LC CDR1 (Combined) | RASESVDSYGNSFMH |
| SEQ ID NO: 1127 | LC CDR2 (Combined) | RASNLES |
| SEQ ID NO: 1128 | LC CDR3 (Combined) | QQSNEDPYT |
| SEQ ID NO: 264 | VL | DIVLTQSPASLAVSLGQRATISCRASESVDSYGNSFMH |
| | | WYQQKPGQPPKLLIYRASNLESGIPARFSGSGSRTDFTL |
| | | TINPVEADDVATYYCQQSNEDPYTFGGGTKLEIK |
| SEQ ID NO: 1130 | VH | EVQLQQSGAELVKPGASVKLSCTASGFKTEDTYMYWV |
| | | KQRPEQGLEWIGRIDPANGNTKYDPKFQDKATITADSS |
| | | SNTAYLQLSSLPSEDTAVYYCARGSYYYAMDYWGQGT |
| | | SVTVSS |

VH for CAS1.1.3 (humanized) also referred to as Antibody H-H (humanized)
Binds to human TCRVβ 27

| | | |
|---|---|---|
| SEQ ID NO: 1131 | VH-1 | QVQLVQSGAEVKKPGSSVKVSCKASGFKTEDTYMYW |
| | | VRQAPGQGLEWIGRIDPANGNTKYDPKFQDRATITADS |
| | | STNTAYMELSSLRSEDTAVYYCARGSYYYAMDYWGQ |
| | | GTLVTVSS |
| SEQ ID NO: 1132 | VH-2 | QVQLVQSGAEVKKPGASVKVSCKASGFKTEDTYMYW |
| | | VRQAPGQRLEWIGRIDPANGNTKYDPKFQDRATITADS |
| | | SANTAYMELSSLRSEDTAVYYCARGSYYYAMDYWGQ |
| | | GTLVTVSS |
| SEQ ID NO: 1133 | VH-3 | EVQLVESGGGLVQPGGSLKLSCAASGFKTEDTYMYWV |
| | | RQASGKGLEWIGRIDPANGNTKYDPKFQDRATISADSS |
| | | KNTAYLQMNSLKTEDTAVYYCARGSYYYAMDYWGQ |
| | | GTLVTVSS |
| SEQ ID NO: 1134 | VH-4 | EVQLVQSGAEVKKPGESLRISCKASGFKTEDTYMYWV |
| | | RQMPGKGLEWIGRIDPANGNTKYDPKFQDQATISADSS |
| | | INTAYLQWSSLKASDTAMYYCARGSYYYAMDYWGQG |
| | | TLVTVSS |
| SEQ ID NO: 1135 | VH-5 | QVQLVQSGSELKKPGASVKVSCKASGFKTEDTYMYWV |
| | | RQAPGQGLEWIGRIDPANGNTKYDPKFQDRAVISADSS |
| | | VNTAYLQISSLKAEDTAVYYCARGSYYYAMDYWGQG |
| | | TLVTVSS |

VL for CAS1.1.3 (humanized) also referred to as Antibody H-H (humanized)
Binds to human TCRVβ 27

| | | |
|---|---|---|
| SEQ ID NO: 1136 | VL-1 | DIVLTQSPDSLAVSLGERATINCRASESVDSYGNSFMH |
| | | WYQQKPGQPPKLLIYRASNLESGVPDRFSGSGSRTDFTL |
| | | TISSLQAEDVAVYYCQQSNEDPYTFGQGTKLEIK |
| SEQ ID NO: 1137 | VL-2 | EIVLTQSPATLSLSPGERATLSCRASESVDSYGNSFMHW |
| | | YQQKPGQAPKLLIYRASNLESGIPARFSGSGSRTDFTLTI |
| | | SRLEPEDFAVYYCQQSNEDPYTFGQGTKLEIK |
| SEQ ID NO: 1138 | VL-3 | DIQLTQSPSSLSASVGDRVTITCRASESVDSYGNSFMHW |
| | | YQQKPGQAPKLLIYRASNLESGVPSRFSGSGSRTDFTLTI |
| | | SSLQPEDVATYYCQQSNEDPYTFGQGTKLEIK |
| SEQ ID NO: 1139 | VL-4 | AIQLTQSPSSLSASVGDRVTITCRASESVDSYGNSFMHW |
| | | YQQKPGKAPKLLIYRASNLESGVPSRFSGSGSRTDFTLTI |
| | | SSLQPEDFATYYCQQSNEDPYTFGQGTKLEIK |
| SEQ ID NO: 1140 | VL-5 | EIVLTQSPDFQSVTPKEKVTITCRASESVDSYGNSFMHW |
| | | YQQKPDQSPKLLIYRASNLESGVPSRFSGSGSRTDFTLTI |
| | | NSLEAEDAATYYCQQSNEDPYTFGQGTKLEIK |

IMMU222 (murine) also referred to as BJ1461; or Antibody I
Binds to human TCRVβ 6-5, 6-6, 6-9

| | | |
|---|---|---|
| SEQ ID NO: 1141 | HC CDR1 (Kabat) | SYAMS |
| SEQ ID NO: 1142 | HC CDR2 (Kabat) | HISNGGDYIYYADTVKG |
| SEQ ID NO: 1143 | HC CDR3 (Kabat) | PSYYSDPWFFDV |
| SEQ ID NO: 1144 | HC CDR1 (Chothia) | GFTFRSY |
| SEQ ID NO: 1145 | HC CDR2 (Chothia) | SNGGDY |
| SEQ ID NO: 1143 | HC CDR3 (Chothia) | PSYYSDPWFFDV |
| SEQ ID NO: 1146 | HC CDR1 (Combined) | GFTFRSYAMS |
| SEQ ID NO: 1142 | HC CDR2 (Combined) | HISNGGDYIYYADTVKG |
| SEQ ID NO: 1143 | HC CDR3 (Combined) | PSYYSDPWFFDV |
| SEQ ID NO: 1147 | LC CDR1 (Kabat) | SAGSSVSFMH |
| SEQ ID NO: 1148 | LC CDR2 (Kabat) | DTSKLAS |
| SEQ ID NO: 1149 | LC CDR3 (Kabat) | LQGSGFPLT |
| SEQ ID NO: 1150 | LC CDR1 (Chothia) | GSSVSF |
| SEQ ID NO: 1148 | LC CDR2 (Chothia) | DTSKLAS |
| SEQ ID NO: 1149 | LC CDR3 (Chothia) | LQGSGFPLT |
| SEQ ID NO: 1147 | LC CDR1 (Combined) | SAGSSVSFMH |
| SEQ ID NO: 1148 | LC CDR2 (Combined) | DTSKLAS |
| SEQ ID NO: 1149 | LC CDR3 (Combined) | LQGSGFPLT |
| SEQ ID NO: 1151 | VL | ENVLTQSPAIMSASPGEKVTMTCSAGSSVSFMHWYQQ |
| | | KSSTSPKLWIYDTSKLASGVPGRFSGSGSGNSFSLTISSM |
| | | EAEDVAIYYCLQGSGFPLTFGSGTKLEIK |
| SEQ ID NO: 1152 | VH | DVKLVESGEGLVKPGGSLKLSCAASGFTFRSYAMSWV |
| | | RQTPEKRLEWVAHISNGGDYIYYADTVKGRFTISRDNA |
| | | RNTLYLQMSSLKSEDTAMYYCTRPSYYSDPWFFDVWG |
| | | TGTTVTVSS |

VH for IMMU222 (humanized) also referred to as Antibody I-H
Binds to human TCRVβ 6-5, 6-6, 6-9

| | | |
|---|---|---|
| SEQ ID NO: 1153 | VH-1 | EVQLVESGGGLVQPGGSLRLSCAASGFTFRSYAMSWV |
| | | RQAPGKGLEWVAHISNGGDYIYYADTVKGRFTISRDNA |
| | | KNSLYLQMNSLRAEDTAVYYCTRPSYYSDPWFFDVWG |
| | | QGTTVTVSS |
| SEQ ID NO: 1154 | VH-2 | QVQLVESGGGVVQPGRSLRLSCAASGFTFRSYAMSWV |
| | | RQAPGKGLEWVAHISNGGDYIYYADTVKGRFTISRDNS |
| | | KNTLYLQMSSLRAEDTAVYYCTRPSYYSDPWFFDVWG |
| | | QGTTVTVSS |
| SEQ ID NO: 1155 | VH-3 | EVQLVESGGGLVQPGGSLRLSCAASGFTFRSYAMSWV |
| | | RQAPGKGLEWVAHISNGGDYIYYADTVKGRFTISRDNS |
| | | KNTLYLQMNSLRAEDTAVYYCTRPSYYSDPWFFDVWG |
| | | QGTTVTVSS |
| SEQ ID NO: 1156 | VH-4 | QVQLVQSGSELKKPGASVKVSCKASGFTFRSYAMSWV |
| | | RQAPGQGLEWVAHISNGGDYIYYADTVKGRFVISRDNS |
| | | VNTLYLQISSLKAEDTAVYYCTRPSYYSDPWFFDVWG |
| | | QGTTVTVSS |
| SEQ ID NO: 1157 | VH-5 | QVQLVQSGAEVKKPGASVKVSCKASGFTFRSYAMSWV |
| | | RQAPGQRLEWVAHISNGGDYIYYADTVKGRFTITRDNS |
| | | ANTLYMELSSLRSEDTAVYYCTRPSYYSDPWFFDVWG |
| | | QGTTVTVSS |

VL for IMMU222 (humanized)) also referred to as Antibody I-H
Binds to human TCRVβ 6-5, 6-6, 6-9

| | | |
|---|---|---|
| SEQ ID NO: 1158 | VL-1 | ENVLTQSPATLSLSPGERATLSCSAGSSVSFMHWYQQK |
| | | PGQAPKLLIYDTSKLASGIPARFSGSGSGNDFTLTISSLEP |
| | | EDFAVYYCLQGSGFPLTFGQGTKLEIK |
| SEQ ID NO: 1159 | VL-2 | ENVLTQSPDFQSVTPKEKVTITCSAGSSVSFMHWYQQK |
| | | PDQSPKLLIYDTSKLASGVPSRFSGSGSGNDFTLTINSLE |
| | | AEDAATYYCLQGSGFPLTFGQGTKLEIK |
| SEQ ID NO: 1160 | VL-3 | DNQLTQSPSSLSASVGDRVTITCSAGSSVSFMHWYQQK |
| | | PGKVPKLLIYDTSKLASGVPSRFSGSGSGNDFTLTISSLQ |
| | | PEDVATYYCLQGSGFPLTFGQGTKLEIK |
| SEQ ID NO: 1161 | VL-4 | ANQLTQSPSSLSASVGDRVTITCSAGSSVSFMHWYQQK |
| | | PGKAPKLLIYDTSKLASGVPSRFSGSGSGNDFTLTISSLQ |
| | | PEDFATYYCLQGSGFPLTFGQGTKLEIK |
| SEQ ID NO: 1162 | VL-5 | DNVLTQSPDSLAVSLGERATINCSAGSSVSFMHWYQQK |
| | | PGQPPKLLIYDTSKLASGVPDRFSGSGSGNDFTLTISSLQ |
| | | AEDVAVYYCLQGSGFPLTFGQGTKLEIK |

REA1062 (murine), also referred to as BJ189 or as Antibody J
Binds to human TCRVβ 5-1

| | | |
|---|---|---|
| SEQ ID NO: 1163 | HC CDR1 (Kabat) | DYNIH |
| SEQ ID NO: 1164 | HC CDR2 (Kabat) | YINPYNGRTGYNQKFKA |
| SEQ ID NO: 1165 | HC CDR3 (Kabat) | WDGSSYFDY |
| SEQ ID NO: 1166 | HC CDR1 (Chothia) | GYTFTDYNIH |
| SEQ ID NO: 1167 | HC CDR2 (Chothia) | NPYNGR |
| SEQ ID NO: 1165 | HC CDR3 (Chothia) | WDGSSYFDY |
| SEQ ID NO: 1166 | HC CDR1 (Combined) | GYTFTDYNIH |
| SEQ ID NO: 1164 | HC CDR2 (Combined) | YINPYNGRTGYNQKFKA |
| SEQ ID NO: 1165 | HC CDR3 (Combined) | WDGSSYFDY |
| SEQ ID NO: 1168 | LC CDR1 (Kabat) | SASSSVSYMH |
| SEQ ID NO: 1169 | LC CDR2 (Kabat) | EISKLAS |
| SEQ ID NO: 1170 | LC CDR3 (Kabat) | QQWNYPLLT |
| SEQ ID NO: 265 | LC CDR1 (Chothia) | SSSVSY |
| SEQ ID NO: 1169 | LC CDR2 (Chothia) | EISKLAS |
| SEQ ID NO: 1170 | LC CDR3 (Chothia) | QQWNYPLLT |
| SEQ ID NO: 1168 | LC CDR1 (Combined) | SASSSVSYMH |
| SEQ ID NO: 1169 | LC CDR2 (Combined) | EISKLAS |
| SEQ ID NO: 1170 | LC CDR3 (Combined) | QQWNYPLLT |
| SEQ ID NO: 1171 | VL | EIVLTQSPAITAASLGQKVTITCSASSSVSYMHWYQQKS |
| | | GTSPKPWIYEISKLASGVPARFSGSGSGTSYSLTISSMEA |
| | | EDAAIYYCQQWNYPLLTFGAGTKLELK |
| SEQ ID NO: 1172 | VH | EVQLQQSGPVLVKPGASVRMSCKASGYTFTDYNIHWV |
| | | KQSHGRSLEWVGYINPYNGRTGYNQKFKAKATLTVDK |
| | | SSSTAYMDLRSLTSEDSAVYYCARWDGSSYFDYWGQG |
| | | TTLTVSS |

VH for REA1062 (humanized) also referred to as Antibody J-H
Binds to human TCRVβ 5-1

| | | |
|---|---|---|
| SEQ ID NO: 1173 | VH-1 | QVQLVQSGAEVKKPGSSVKVSCKASGYTFTDYNIHWV |
| | | RQAPGQGLEWVGYINPYNGRTGYNQKFKARATLTVDK |
| | | STSTAYMELSSLRSEDTAVYYCARWDGSSYFDYWGQG |
| | | TTVTVSS |
| SEQ ID NO: 1174 | VH-2 | QVQLVQSGAEVKKPGASVKVSCKASGYTFTDYNIHWV |
| | | RQAPGQGLEWVGYINPYNGRTGYNQKFKARATLTVDK |
| | | STSTAYMELRSLRSDDMAVYYCARWDGSSYFDYWGQ |
| | | GTTVTVSS |
| SEQ ID NO: 1175 | VH-3 | QVQLVQSGAEVKKPGASVKVSCKASGYTFTDYNIHWV |
| | | RQATGQGLEWVGYINPYNGRTGYNQKFKARATLTVN |
| | | KSISTAYMELSSLRSEDTAVYYCARWDGSSYFDYWGQ |
| | | GTTVTVSS |
| SEQ ID NO: 1176 | VH-4 | EVQLVESGGGLVQPGRSLRLSCTASGYTFTDYNIHWVR |
| | | QAPGKGLEWVGYINPYNGRTGYNQKFKARATLSVDKS |
| | | KSIAYLQMNSLKTEDTAVYYCARWDGSSYFDYWGQG |
| | | TTVTVSS |
| SEQ ID NO: 1177 | VH-5 | QVQLVQSGSELKKPGASVKVSCKASGYTFTDYNIHWV |
| | | RQAPGQGLEWVGYINPYNGRTGYNQKFKARAVLSVD |
| | | KSVSTAYLQISSLKAEDTAVYYCARWDGSSYFDYWGQ |
| | | GTTVTVSS |

VL for REA1062 (humanized) also referred to as Antibody J-H
Binds to human TCRVβ 5-1

| | | |
|---|---|---|
| SEQ ID NO: 1178 | VL-1 | EIVLTQSPATLSLSPGERATLSCSASSSVSYMHWYQQKP |
| | | GQAPKLLIYEISKLASGIPARFSGSGSGTDYTLTISSLEPE |
| | | DFAVYYCQQWNYPLLTFGQGTKLEIK |
| SEQ ID NO: 1179 | VL-2 | EIVLTQSPATLSLSPGERATLSCSASSSVSYMHWYQQKP |
| | | GQAPKLLIYEISKLASGIPARFSGSGSGTDYTLTISRLEPE |
| | | DFAVYYCQQWNYPLLTFGQGTKLEIK |
| SEQ ID NO: 1180 | VL-3 | EIVLTQSPDFQSVTPKEKVTITCSASSSVSYMHWYQQKP |
| | | DQSPKLLIYEISKLASGVPSRFSGSGSGTDYTLTINSLEA |
| | | EDAATYYCQQWNYPLLTFGQGTKLEIK |
| SEQ ID NO: 1181 | VL-4 | DIQLTQSPSFLSASVGDRVTITCSASSSVSYMHWYQQKP |
| | | GKAPKLLIYEISKLASGVPSRFSGSGSGTEYTLTISSLQPE |
| | | DFATYYCQQWNYPLLTFGQGTKLEIK |
| SEQ ID NO: 1182 | VL-5 | AIQLTQSPSSLSASVGDRVTITCSASSSVSYMHWYQQKP |
| | | GKAPKLLIYEISKLASGVPSRFSGSGSGTDYTLTISSLQP |
| | | EDFATYYCQQWNYPLLTFGQGTKLEIK |
| SEQ ID NO: 1183 | VL-6 | AIRLTQSPFSLSASVGDRVTITCSASSSVSYMHWYQQKP |
| | | AKAPKLFIYEISKLASGVPSRFSGSGSGTDYTLTISSLQPE |
| | | DFATYYCQQWNYPLLTFGQGTKLEIK |
| SEQ ID NO: 1184 | VL-7 | DIVLTQSPDSLAVSLGERATINCSASSSVSYMHWYQQK |
| | | PGQPPKLLIYEISKLASGVPDRFSGSGSGTDYTLTISSLQ |
| | | AEDVAVYYCQQWNYPLLTFGQGTKLEIK |

JOVI-3 (murine), also referred to as BJ1187 or Antibody K
Binds to human TCRVβ 28

| | | |
|---|---|---|
| SEQ ID NO: 1185 | HC CDR1 (Kabat) | GSWMN |
| SEQ ID NO: 1186 | HC CDR2 (Kabat) | RIYPGDGDTDYSGKFKG |
| SEQ ID NO: 1187 | HC CDR3 (Kabat) | SGYFNYVPVFDY |
| SEQ ID NO: 1188 | HC CDR1 (Chothia) | GYTFSGS |
| SEQ ID NO: 1189 | HC CDR2 (Chothia) | YPGDGD |
| SEQ ID NO: 1187 | HC CDR3 (Chothia) | SGYFNYVPVFDY |
| SEQ ID NO: 1190 | HC CDR1 (Combined) | GYTFSGSWMN |
| SEQ ID NO: 1186 | HC CDR2 (Combined) | RIYPGDGDTDYSGKFKG |
| SEQ ID NO: 1187 | HC CDR3 (Combined) | SGYFNYVPVFDY |
| SEQ ID NO: 1191 | LC CDR1 (Kabat) | SANSTVGYIH |
| SEQ ID NO: 1192 | LC CDR2 (Kabat) | TTSNLAS |
| SEQ ID NO: 1193 | LC CDR3 (Kabat) | HQWSFYPT |
| SEQ ID NO: 1194 | LC CDR1 (Chothia) | NSTVGY |
| SEQ ID NO: 1192 | LC CDR2 (Chothia) | TTSNLAS |
| SEQ ID NO: 1193 | LC CDR3 (Chothia) | HQWSFYPT |
| SEQ ID NO: 1191 | LC CDR1 (Combined) | SANSTVGYIH |
| SEQ ID NO: 1192 | LC CDR2 (Combined) | TTSNLAS |
| SEQ ID NO: 1193 | LC CDR3 (Combined) | HQWSFYPT |
| SEQ ID NO: 1195 | VL | QIVLTQSPAIMSASLGEEIALTCSANSTVGYIHWYQQKS |
| | | GTSPKLLIYTTSNLASGVPSRFSGSGSGTFYSLTISSVEAE |
| | | DAADYFCHQWSFYPTFGGGTKLEIK |
| SEQ ID NO: 1196 | VH | QIQLQQSGPEVVKPGASVQISCKASGYTFSGSWMNWV |
| | | KQRPGKGLEWIGRIYPGDGDTDYSGKFKGRATLTADKS |
| | | SSTAYMRLSSLTSEDSAVYFCARSGYFNYVPVFDYWG |
| | | QGTTLSVSS |

VH for JOVI-3 (humanized) also referret to as Antibody K-H
Binds to human TCRVβ 28

| | | |
|---|---|---|
| SEQ ID NO: 1197 | VH-1 | QIQLVQSGAEVKKPGASVKVSCKASGYTFSGSWMNWV |
| | | RQAPGQGLEWIGRIYPGDGDTDYSGKFKGRATLTADKS |
| | | TSTAYMELSSLRSEDTAVYYCARSGYFNYVPVFDYWG |
| | | QGTTVTVSS |
| SEQ ID NO: 1198 | VH-2 | QIQLVQSGAEVKKPGSSVKVSCKASGYTFSGSWMNWV |
| | | RQAPGQGLEWIGRIYPGDGDTDYSGKFKGRATLTADKS |
| | | TSTAYMELSSLRSEDTAVYYCARSGYFNYVPVFDYWG |
| | | QGTTVTVSS |
| SEQ ID NO: 1199 | VH-3 | EIQLVQSGAEVKKPGESLKISCKASGYTFSGSWMNWVR |
| | | QMPGKGLEWIGRIYPGDGDTDYSGKFKGQATLSADKSI |
| | | STAYLQWSSLKASDTAMYYCARSGYFNYVPVFDYWG |
| | | QGTTVTVSS |
| SEQ ID NO: 1200 | VH-4 | QIQLVQSGSELKKPGASVKVSCKASGYTFSGSWMNWV |
| | | RQAPGQGLEWIGRIYPGDGDTDYSGKFKGRAVLSADK |
| | | SVSTAYLQISSLKAEDTAVYYCARSGYFNYVPVFDYW |
| | | GQGTTVTVSS |
| SEQ ID NO: 1201 | VH-5 | QIQLVQSGSELKKPGASVKVSCKASGYTFSGSWMNWV |
| | | RQAPGQGLEWIGRIYPGDGDTDYSGKFKGRAVLSADK |
| | | SVSMAYLQISSLKAEDTAVYYCARSGYFNYVPVFDYW |
| | | GQGTTVTVSS |
| SEQ ID NO: 1202 | VH-6 | EIQLVESGGGLVQPGRSLRLSCTASGYTFSGSWMNWVR |
| | | QAPGKGLEWIGRIYPGDGDTDYSGKFKGRATLSADKSK |
| | | SIAYLQMNSLKTEDTAVYYCARSGYFNYVPVFDYWGQ |
| | | GTTVTVSS |

VL for JOVI-3 (humanized) also referred to as Antibody K-H
Binds to human TCRVβ 28

| | | |
|---|---|---|
| SEQ ID NO: 1203 | VL-1 | EIVLTQSPATLSLSPGERATLSCSANSTVGYIHWYQQKP |
| | | GQAPKLLIYTTSNLASGIPARFSGSGSGTDYTLTISSLEPE |
| | | DFAVYFCHQWSFYPTFGQGTKLEIK |
| SEQ ID NO: 1204 | VL-2 | DIQLTQSPSFLSASVGDRVTITCSANSTVGYIHWYQQKP |
| | | GKAPKLLIYTTSNLASGVPSRFSGSGSGTEYTLTISSLQP |
| | | EDFATYFCHQWSFYPTFGQGTKLEIK |
| SEQ ID NO: 1205 | VL-3 | EIVLTQSPATLSLSPGERATLSCSANSTVGYIHWYQQKP |
| | | GQAPKLLIYTTSNLASGIPARFSGSGPGTDYTLTISSLEPE |
| | | DFAVYFCHQWSFYPTFGQGTKLEIK |
| SEQ ID NO: 1206 | VL-4 | DIVLTQSPDSLAVSLGERATINCSANSTVGYIHWYQQKP |
| | | GQPPKLLIYTTSNLASGVPDRFSGSGSGTDYTLTISSLQA |
| | | EDVAVYFCHQWSFYPTFGQGTKLEIK |
| SEQ ID NO: 1207 | VL-5 | EIVLTQSPDFQSVTPKEKVTITCSANSTVGYIHWYQQKP |
| | | DQSPKLLIYTTSNLASGVPSRFSGSGSGTDYTLTINSLEA |
| | | EDAATYFCHQWSFYPTFGQGTKLEIK |

ZOE (murine), also referred to as BJ1538 or as Antibody L
Binds to human TCRVβ 4-1, 4-2, 4-3

| | | |
|---|---|---|
| SEQ ID NO: 1208 | HC CDR1 (Kabat) | DYYMY |
| SEQ ID NO: 1209 | HC CDR2 (Kabat) | TISGGGSYTYSPDSVKG |
| SEQ ID NO: 1210 | HC CDR3 (Kabat) | ERDIYYGNFNAMVY |
| SEQ ID NO: 1211 | HC CDR1 (Chothia) | GFTFSDY |
| SEQ ID NO: 1212 | HC CDR2 (Chothia) | SGGGSY |
| SEQ ID NO: 1210 | HC CDR3 (Chothia) | ERDIYYGNFNAMVY |
| SEQ ID NO: 1213 | HC CDR1 (Combined) | GFTFSDYYMY |
| SEQ ID NO: 1209 | HC CDR2 (Combined) | TISGGGSYTYSPDSVKG |
| SEQ ID NO: 1210 | HC CDR3 (Combined) | ERDIYYGNFNAMVY |
| SEQ ID NO: 1214 | LC CDR1 (Kabat) | RASKSVSTSGYSYMH |
| SEQ ID NO: 1215 | LC CDR2 (Kabat) | LASNLES |
| SEQ ID NO: 1216 | LC CDR3 (Kabat) | QHSRDLPWT |
| SEQ ID NO: 1217 | LC CDR1 (Chothia) | SKSVSTSGYSY |
| SEQ ID NO: 1215 | LC CDR2 (Chothia) | LASNLES |
| SEQ ID NO: 1216 | LC CDR3 (Chothia) | QHSRDLPWT |
| SEQ ID NO: 1214 | LC CDR1 (Combined) | RASKSVSTSGYSYMH |
| SEQ ID NO: 1215 | LC CDR2 (Combined) | LASNLES |
| SEQ ID NO: 1216 | LC CDR3 (Combined) | QHSRDLPWT |
| SEQ ID NO: 1218 | VL | DIVLTQSPVSLTVSLGQRATISCRASKSVSTSGYSYMHW |
| | | YQQKPGQPPKLLIYLASNLESGVPARFSGSGSGTDFTLN |
| | | IHPVEEEDAATYYCQHSRDLPWTFGGGTKLEIK |
| SEQ ID NO: 1219 | VH | EVQLVESGGGLVKPGGSLKLSCAASGFTFSDYYMYWV |
| | | RQTPEKRLEWVATISGGGSYTYSPDSVKGRFTISRDNA |
| | | KNNLYLQMSSLRSEDTAMYFCARERDIYYGNFNAMVY |
| | | WGRGTSVTVSS |

VH for ZOE (humanized) also referred to as Antibody L-H
Binds to human TCRVβ 4-1, 4-2, 4-3

| | | |
|---|---|---|
| SEQ ID NO: 1220 | VH-1 | EVQLLESGGGLVQPGGSLRLSCAASGFTFSDYYMYWV |
| | | RQAPGKGLEWVATISGGGSYTYSPDSVKGRFTISRDNS |
| | | KNTLYLQMNSLRAEDTAVYYCARERDIYYGNFNAMV |
| | | YWGRGTLVTVSS |
| SEQ ID NO: 1221 | VH-2 | EVQLVESGGGLVQPGGSLRLSCAASGFTFSDYYMYWV |
| | | RQAPGKGLEWVATISGGGSYTYSPDSVKGRFTISRDNA |
| | | KNSLYLQMNSLRAEDTAVYYCARERDIYYGNFNAMV |
| | | YWGRGTLVTVSS |
| SEQ ID NO: 1222 | VH-3 | QVQLVESGGGVVQPGRSLRLSCAASGFTFSDYYMYW |
| | | VRQAPGKGLEWVATISGGGSYTYSPDSVKGRFTISRDN |
| | | SKNTLYLQMNSLRAEDTAVYYCARERDIYYGNFNAM |
| | | VYWGRGTLVTVSS |
| SEQ ID NO: 1223 | VH-4 | QVQLVESGGGLVKPGGSLRLSCAASGFTFSDYYMYWI |
| | | RQAPGKGLEWVATISGGGSYTYSPDSVKGRFTISRDNA |
| | | KNSLYLQMNSLRAEDTAVYYCARERDIYYGNFNAMV |
| | | YWGRGTLVTVSS |

VL for ZOE (humanized) also referred to as Antibody L-H
Binds to human TCRVβ 4-1, 4-2, 4-3

| | | |
|---|---|---|
| SEQ ID NO: 1224 | VL-1 | EIVLTQSPGTLSLSPGERATLSCRASKSVSTSGYSYMHW |
| | | YQQKPGQAPRLLIYLASNLESGIPDRFSGSGSGTDFTLTI |
| | | SRLEPEDFAVYYCQHSRDLPWTFGGGTKVEIK |
| SEQ ID NO: 1225 | VL-2 | EIVLTQSPATLSLSPGERATLSCRASKSVSTSGYSYMHW |
| | | YQQKPGQAPRLLIYLASNLESGIPARFSGSGSGTDFTLTI |
| | | SSLEPEDFAVYYCQHSRDLPWTFGGGTKVEIK |
| SEQ ID NO: 1226 | VL-3 | DIQLTQSPSTLSASVGDRVTITCRASKSVSTSGYSYMHW |
| | | YQQKPGKAPKLLIYLASNLESGVPSRFSGSGSGTEFTLTI |
| | | SSLQPDDFATYYCQHSRDLPWTFGGGTKVEIK |
| SEQ ID NO: 1227 | VL-4 | AIQLTQSPSSLSASVGDRVTITCRASKSVSTSGYSYMHW |
| | | YQQKPGKAPKLLIYLASNLESGVPSRFSGSGSGTDFTLTI |
| | | SSLQPEDFATYYCQHSRDLPWTFGGGTKVEIK |

Anti-TCRvb19 (murine), also referred to as BJ1465; or Antibody M
Binds to human TCRVβ 19

| | | |
|---|---|---|
| SEQ ID NO: 1229 | HC CDR1 (Kabat) | GYFWN |
| SEQ ID NO: 1230 | HC CDR2 (Kabat) | YISYDGSNNYNPSLKN |
| SEQ ID NO: 1231 | HC CDR3 (Kabat) | PSPGTGYAVDY |
| SEQ ID NO: 1232 | HC CDR1 (Chothia) | GYSITSGY |
| SEQ ID NO: 1233 | HC CDR2 (Chothia) | SYDGSN |
| SEQ ID NO: 1231 | HC CDR3 (Chothia) | PSPGTGYAVDY |
| SEQ ID NO: 1234 | HC CDR1 (Combined) | GYSITSGYFWN |
| SEQ ID NO: 1230 | HC CDR2 (Combined) | YISYDGSNNYNPSLKN |
| SEQ ID NO: 1231 | HC CDR3 (Combined) | PSPGTGYAVDY |
| SEQ ID NO: 1235 | LC CDR1 (Kabat) | RSSQSLVHSNGNTYLH |
| SEQ ID NO: 1236 | LC CDR2 (Kabat) | KVSNRFS |
| SEQ ID NO: 1237 | LC CDR3 (Kabat) | SQSTHVPFT |
| SEQ ID NO: 1238 | LC CDR1 (Chothia) | SQSLVHSNGNTY |
| SEQ ID NO: 1236 | LC CDR2 (Chothia) | KVSNRFS |
| SEQ ID NO: 1237 | LC CDR3 (Chothia) | SQSTHVPFT |
| SEQ ID NO: 1235 | LC CDR1 (Combined) | RSSQSLVHSNGNTYLH |
| SEQ ID NO: 1236 | LC CDR2 (Combined) | KVSNRFS |
| SEQ ID NO: 1237 | LC CDR3 (Combined) | SQSTHVPFT |
| SEQ ID NO: 1239 | VL | NVVMTQTPLSLPVSLGDQASISCRSSQSLVHSNGNTYL |
| | | HWYLQKPGQSPKFLIYKVSNRFSGVPDRFSGGGSGTEF |
| | | TLKISRVEAEDLGVYFCSQSTHVPFTFGSGTKLEIK |
| SEQ ID NO: 1240 | VH | NVQLQESGPGLVKPSQSLSLTCSVAGYSITSGYFWNWI |
| | | RQFPGNKLEWMGYISYDGSNNYNPSLKNRISITRDTSK |
| | | NQFFLKLNSVTTEDTATYYCASPSPGTGYAVDYWGQG |
| | | TSVTVSS |

VH for Anti-TCRvb19 (humanized) also referred to as Antibody M-H
Binds to human TCRVβ 19

| | | |
|---|---|---|
| SEQ ID NO: 1241 | VH-1 | QVQLQESGPGLVKPSETLSLTCTVSGYSITSGYFWNWIR |
| | | QPPGKGLEWIGYISYDGSNNYNPSLKNRVTISRDTSKNQ |
| | | FSLKLSSVTAADTAVYYCASPSPGTGYAVDYWGQGTL |
| | | VTVSS |
| SEQ ID NO: 1242 | VH-2 | QVQLQESGPGLVKPSETLSLTCTVSGYSITSGYFWNWIR |
| | | QPPGKGLEWIGYISYDGSNNYNPSLKNRVTISRDTSKNQ |
| | | FSLKLSSVTAADTAVYYCASPSPGTGYAVDYWGQGTL |
| | | VTVSS |
| SEQ ID NO: 1243 | VH-3 | QVQLVESGGGLVQPGGSLRLSCSVSGYSITSGYFWNWV |
| | | RQAPGKGLEWVGYISYDGSNNYNPSLKNRFTISRDTSK |
| | | NTFYLQMNSLRAEDTAVYYCASPSPGTGYAVDYWGQ |
| | | GTLVTVSS |

VL for Anti-TCRv19 (humanized) also referred to as Antibody M-H
Binds to human TCRVβ 19

| | | |
|---|---|---|
| SEQ ID NO: 1244 | VL-1 | VVMTQSPGTLSLSPGERATLSCRSSQSLVHSNGNTYLH |
| | | WYQQKPGQAPRFLIYKVSNRFSGIPDRFSGSGSGTDFTL |
| | | TISRLEPEDFAVYFCSQSTHVPFTFGQGTKLEIK |
| SEQ ID NO: 1245 | VL-2 | EVVMTQSPATLSLSPGERATLSCRSSQSLVHSNGNTYL |
| | | HWYQQKPGQAPRFLIYKVSNRFSGIPARFSGSGSGTDFT |
| | | LTISSLEPEDFAVYFCSQSTHVPFTFGQGTKLEIK |
| SEQ ID NO: 1246 | VL-3 | EVVMTQSPATLSVSPGERATLSCRSSQSLVHSNGNTYL |
| | | HWYQQKPGQAPRFLIYKVSNRFSGIPARFSGSGSGTEFT |
| | | LTISSLQSEDFAVYFCSQSTHVPFTFGQGTKLEIK |
| SEQ ID NO: 1247 | VL-4 | DVQMTQSPSSLSASVGDRVTITCRSSQSLVHSNGNTYL |
| | | HWYQQKPGKAPKFLIYKVSNRFSGVPSRFSGSGSGTDF |
| | | TFTISSLQPEDIATYFCSQSTHVPFTFGQGTKLEIK |

BL37.2 (murine), also referred to as BJ1539 or Antibody N
Binds to human TCRVβ 9

| | | |
|---|---|---|
| SEQ ID NO: 1248 | HC CDR1 (Kabat) | DYIVH |
| SEQ ID NO: 1249 | HC CDR2 (Kabat) | WINTYTGTPTYADDFEG |
| SEQ ID NO: 1250 | HC CDR3 (Kabat) | SWRRGIRGIGFDY |
| SEQ ID NO: 1251 | HC CDR1 (Chothia) | GYTFTDY |
| SEQ ID NO: 1252 | HC CDR2 (Chothia) | NTYTGT |
| SEQ ID NO: 1250 | HC CDR3 (Chothia) | SWRRGIRGIGFDY |
| SEQ ID NO: 1253 | HC CDR1 (Combined) | GYTFTDYIVH |
| SEQ ID NO: 1249 | HC CDR2 (Combined) | WINTYTGTPTYADDFEG |
| SEQ ID NO: 1250 | HC CDR3 (Combined) | SWRRGIRGIGFDY |
| SEQ ID NO: 1254 | LC CDR1 (Kabat) | KASKSINKYLA |
| SEQ ID NO: 1255 | LC CDR2 (Kabat) | DGSTLQS |
| SEQ ID NO: 1256 | LC CDR3 (Kabat) | QQHNEYPPT |
| SEQ ID NO: 1257 | LC CDR1 (Chothia) | SKSINKY |
| SEQ ID NO: 1255 | LC CDR2 (Chothia) | DGSTLQS |
| SEQ ID NO: 1256 | LC CDR3 (Chothia) | QQHNEYPPT |
| SEQ ID NO: 1254 | LC CDR1 (Combined) | KASKSINKYLA |
| SEQ ID NO: 1255 | LC CDR2 (Combined) | DGSTLQS |
| SEQ ID NO: 1256 | LC CDR3 (Combined) | QQHNEYPPT |
| SEQ ID NO: 1258 | VL | DVQMTQSPYNLAASPGESVSINCKASKSINKYLAWYQQ |
| | | KPGKPNKLLIYDGSTLQSGIPSRFSGSGSGTDFTLTIRGL |
| | | EPEDFGLYYCQQHNEYPPTFGAGTKLELK |
| SEQ ID NO: 1259 | VH | QLQLVQSGPELREPGESVKISCKASGYTFTDYIVHWVK |
| | | QAPGKGLKWMGWINTYTGTPTYADDFEGRFVFSLEAS |
| | | ASTANLQISNLKNEDTATYFCARSWRRGIRGIGFDYWG |
| | | QGVMVTVSS |

VH for BL37.2 (humanized) also referred to as Antibody N-H
Binds to human TCRVβ 9

| | | |
|---|---|---|
| SEQ ID NO: 1260 | VH-1 | QLQLVQSGAEVKKPGASVKVSCKASGYTFTDYIVHWV |
| | | RQAPGQGLEWMGWINTYTGTPTYADDFEGWVTMTLD |
| | | ASISTAYMELSRLRSDDTAVYYCARSWRRGIRGIGFDY |
| | | WGQGTMVTVSS |
| SEQ ID NO: 1261 | VH-2 | QLQLVQSGAEVKKPGASVKVSCKASGYTFTDYIVHWV |
| | | RQAPGQGLEWMGWINTYTGTPTYADDFEGRVTMTLD |
| | | ASTSTAYMELSSLRSEDTAVYYCARSWRRGIRGIGFDY |
| | | WGQGTMVTVSS |
| SEQ ID NO: 1262 | VH-3 | QLQLVQSGAEVKKPGASVKVSCKASGYTFTDYIVHWV |
| | | RQAPGQRLEWMGWINTYTGTPTYADDFEGRVTITLDA |
| | | SASTAYMELSSLRSEDMAVYYCARSWRRGIRGIGFDY |
| | | WGQGTMVTVSS |
| SEQ ID NO: 1263 | VH-4 | QLQLVQSGAEVKKPGASVKVSCKASGYTFTDYIVHWV |
| | | RQATGQGLEWMGWINTYTGTPTYADDFEGRVTMTLN |
| | | ASISTAYMELSSLRSEDTAVYYCARSWRRGIRGIGFDY |
| | | WGQGTMVTVSS |

VL for BL37.2 (humanized) also referred to as Antibody N-H
Binds to human TCRVβ 9

| | | |
|---|---|---|
| SEQ ID NO: 1264 | VL-1 | EVVMTQSPGTLSLSPGERATLSCKASKSINKYLAWYQQ |
| | | KPGQAPRLLIYDGSTLQSGIPDRFSGSGSGTDFTLTISRL |
| | | EPEDFAVYYCQQHNEYPPTFGQGTKLEIK |
| SEQ ID NO: 1265 | VL-2 | EVVMTQSPATLSLSPGERATLSCKASKSINKYLAWYQQ |
| | | KPGQAPRLLIYDGSTLQSGIPARFSGSGSGTDFTLTISSLE |
| | | PEDFAVYYCQQHNEYPPTFGQGTKLEIK |
| SEQ ID NO: 1266 | VL-3 | DVQMTQSPSSLSASVGDRVTITCKASKSINKYLAWYQQ |
| | | KPGKAPKLLIYDGSTLQSGVPSRFSGSGSGTDFTLTISSL |
| | | QPEDFATYYCQQHNEYPPTFGQGTKLEIK |
| SEQ ID NO: 1267 | VL-4 | AVRMTQSPSSFSASTGDRVTITCKASKSINKYLAWYQQ |
| | | KPGKAPKLLIYDGSTLQSGVPSRFSGSGSGTDFTLTISCL |
| | | QSEDFATYYCQQHNEYPPTFGQGTKLEIK |

IG125 (murine) binds to TRVβ 11-2; also referred to as Antibody O

| | | |
|---|---|---|
| SEQ ID NO: 1268 | HC CDR1 (Kabat) | NYGVH |
| SEQ ID NO: 1269 | HC CDR2 (Kabat) | VIWSDGSTDYDTAFIS |
| SEQ ID NO: 1270 | HC CDR3 (Kabat) | RAVVADFDY |
| SEQ ID NO: 1271 | HC CDR1 (Chothia) | GFSLTN |
| SEQ ID NO: 1272 | HC CDR2 (Chothia) | VIWSDGSTD |
| SEQ ID NO: 1270 | HC CDR3 (Chothia) | RAVVADFDY |
| SEQ ID NO: 1273 | HC CDR1 (combined) | GFSLTNYGVH |
| SEQ ID NO: 1269 | HC CDR2 (combined) | VIWSDGSTDYDTAFIS |
| SEQ ID NO: 1270 | HC CDR3 (combined) | RAVVADFDY |
| SEQ ID NO: 1274 | VH | QVQLKQSGPGLLQPSQSLSITCTVSGFSLTNYGVHWVR |
| | | QSPGKGLEWLGVIWSDGSTDYDTAFISRLSISKDNSKSQ |
| | | VFFKLNSLQADDTAIYYCARRAVVADFDYWGQGTTLT |
| | | VSS |
| SEQ ID NO: 1275 | LC CDR1 (Kabat) | KASKEVTIFGSISALH |
| SEQ ID NO: 1276 | LC CDR2 (Kabat) | NGAKLES |
| SEQ ID NO: 1277 | LC CDR3 (Kabat) | LQNKEVPFT |
| SEQ ID NO: 1275 | LC CDR1 (Chothia) | KASKEVTIFGSISALH |
| SEQ ID NO: 1276 | LC CDR2 (Chothia) | NGAKLES |
| SEQ ID NO: 1277 | LC CDR3 (Chothia) | LQNKEVPFT |
| SEQ ID NO: 1275 | LC CDR1 (combined) | KASKEVTIFGSISALH |
| SEQ ID NO: 1276 | LC CDR2 (combined) | NGAKLES |
| SEQ ID NO: 1277 | LC CDR3 (combined) | LQNKEVPFT |
| SEQ ID NO: 1278 | VL | DIVLTQSPASLAVSLGQKATISCKASKEVTIFGSISALH |
| | | WYQQKPGQPPKLIYNGAKLESGVSARFSDSGSQNRSPF |
| | | GNQLSFTLTIAPVEADDAATYYCLQNKEVPFTFGSGTK |
| | | LEIK |

VL for IG125 (humanized) also referred to as Antibody O-H
binds to TRVβ 11-2

| | | |
|---|---|---|
| SEQ ID NO: 1279 | VL-1 | DIVLTQSPDSLAVSLGERATINCKASKEVTIFGSISALH |
| | | WYQQKPGQPPKLLYNGAKLESGVSARFGVPDRFSRSG |
| | | SGLDFTLTISSLQAEDVAVYYCLQNKEVPFTFGQGTKL |
| | | EIK |
| SEQ ID NO: 1280 | VL-2 | EIVLTQSPDFQSVTPKEKVTITCKASKEVTIFGSISALH |
| | | WYQQKPDQSPKLLYNGAKLESGVSARFGVPSRFSRSG |
| | | SGLDFTLTINSLEAEDAATYYCLQNKEVPFTFGQGTKL |
| | | EIK |
| SEQ ID NO: 1281 | VL-3 | AIQLTQSPSSLSASVGDRVTITCKASKEVTIFGSISALH |
| | | WYQQKPGKAPKLLYNGAKLESGVSARFGVPSRFSRSG |
| | | SGLDFTLTISSLQPEDFATYYCLQNKEVPFTFGQGTKLE |
| | | IK |
| SEQ ID NO: 1282 | VL-4 | DIVLTQTPLSLSVTPGQPASISCKASKEVTIFGSISALHW |
| | | YLQKPGQPPKLLYNGAKLESGVSARFGVPDRFSRSGS |
| | | GLDFTLKISRVEAEDVGVYYCLQNKEVPFTFGQGTKL |
| | | EIK |

VH for IG125 (humanized) also referred to as Antibody O-H
binds to TRVβ 11-2

| | | |
|---|---|---|
| SEQ ID NO: 1283 | VH-1 | QVTLKESGPVLVKPTETLTLTCTVSGFSLTNYGVHWV |
| | | RQPPGKALEWLGVIWSDGSTDYDTAFISRLTISKDNSK |
| | | SQVVLTMTNMDPVDTATYYCARRAVVADFDYWGQG |
| | | TTVTVSS |
| SEQ ID NO: 1284 | VH-2 | QVQLQESGPGLVKPSGTLSLTCAVSGFSLTNYGVHWV |
| | | RQPPGKGLEWLGVIWSDGSTDYDTAFISRLTISKDNSK |
| | | SQVSLKLSSVTAADTAVYYCARRAVVADFDYWGQGT |
| | | TVTVSS |
| SEQ ID NO: 1285 | VH-3 | QVQLQQSGPGLVKPSQTLSLTCAVSGFSLTNYGVHWV |
| | | RQSPSRGLEWLGVIWSDGSTDYDTAFISRLTINKDNSK |
| | | SQVSLQLNSVTPEDTAVYYCARRAVVADFDYWGQGT |
| | | TVTVSS |
| SEQ ID NO: 1286 | VH-4 | EVQLVESGGGLVQPGPSLRLSCTVSGFSLTNYGVHWV |
| | | RQAPGKGLEWLGVIWSDGSTDYDTAFISRLTISKDNSK |
| | | SIVYLQMNSLKTEDTAVYYCARRAVVADFDYWGQGT |
| | | TVTVSS |
| SEQ ID NO: 1287 | VH-5 | EVQLVQSGAEVKKPGESLRISCKVSGFSLTNYGVHWV |
| | | RQMPGKGLEWLGVIWSDGSTDYDTAFISQLTISKDNSI |
| | | STVYLQWSSLKASDTAMYYCARRAVVADFDYWGQG |
| | | TTVTVSS |

MR5-2 (murine), Binds to human TCRVβ 13-2

| | | |
|---|---|---|
| SEQ ID NO: 1376 | SCFV (VH + VL) | QVQLQQSGTELMKPGASVKISCKASGYTFSNYWIEWI |
| | | KQRPGHGLEWVGEILPGAGPTNYNEKFKGKATFTADS |
| | | SSNTAYMQLSSLTSEDSAVYYCARTDYDYDWFAYWG |
| | | QGTLVTVSAGGGGSGGGGSGGGGSGGGGSDIVMSQSP |
| | | SSLAVSVGEKVTMSCKSSQSLLYSGNQKNYLAWYQQ |
| | | KPGQSPKLLIYWASTRESGVPDRFTGSGSGTDFTLTINS |
| | | VKAEDLTVYYCQQYYGYPRTFGGGTKVEIK |

### Anti-TCRVβ Antibody Effector Function and Fc Variants

[0467] In some embodiments, an anti-TCRVβ antibody disclosed herein comprises an Fc region, e.g., as described herein. In some embodiments, the Fc region is a wildtype Fc region, e.g., a wildtype human Fc region. In some embodiments, the Fc region comprises a variant, e.g., an Fc region comprising an addition, substitution, or deletion of at least one amino acid residue in the Fc region which results in, e.g., reduced or ablated affinity for at least one Fc receptor.

[0468] The Fc region of an antibody interacts with a number of receptors or ligands including Fc Receptors (e.g., FcγRI, FcγRIIA, FcγRIIIA), the complement protein CIq, and other molecules such as proteins A and G. These interactions are essential for a variety of effector functions and downstream signaling events including: antibody dependent cell-mediated cytotoxicity (ADCC), Antibody-dependent cellular phagocytosis (ADCP) and complement dependent cytotoxicity (CDC).

[0469] In some embodiments, an anti-TCRVβ antibody comprising a variant Fc region has reduced, e.g., ablated, affinity for an Fe receptor, e.g., an Fc receptor described herein. In some embodiments, the reduced affinity is compared to an otherwise similar antibody with a wildtype Fc region.

[0470] In some embodiments, an anti-TCRVβ antibody comprising a variant Fc region has one or more of the following properties: (1) reduced effector function (e.g., reduced ADCC, ADCP and/or CDC); (2) reduced binding to one or more Fc receptors; and/or (3) reduced binding to C1q complement. In some embodiments, the reduction in any one, or all of properties (1)-(3) is compared to an otherwise similar antibody with a wildtype Fc region.

[0471] In some embodiments, an anti-TCRVβ antibody comprising a variant Fc region has reduced affinity to a human Fc receptor, e.g., FcγR I, FcγR II and/or FcγR III. In some embodiments, the anti-TCRVβ antibody comprising a variant Fc region comprises a human IgG1 region or a human IgG4 region.

[0472] In some embodiments, an anti-TCRVβ antibody comprising a variant Fc region activates and/or expands T cells, e.g., as described herein. In some embodiments, an anti-TCRVβ antibody comprising a variant Fc region has a cytokine profile described herein, e.g., a cytokine profile that differs from a cytokine profile of a T cell engager that binds to a receptor or molecule other than a TCRβV region (“a non-TCRβV-binding T cell engager”). In some embodiments, the non-TCRβV-binding T cell engager comprises an antibody that binds to a CD3 molecule (e.g., CD3 epsilon (CD3e) molecule); or a TCR alpha (TCRα) molecule.

[0473] Exemplary Fc region variants are provided in Table 21A and also disclosed in Saunders O, (2019) Frontiers in Immunology; vol 10, article 1296, the entire contents of which is hereby incorporated by reference.

[0474] In some embodiments, an anti-TCRVβ antibody disclosed herein comprises any one or all, or any combination of Fc region variants, e.g., mutations, disclosed in Table 21A. In some embodiments, an anti-TCRVβ antibody disclosed herein comprise an Asn297Ala (N297A) mutation. In some embodiments, an anti-TCRVβ antibody disclosed herein comprise a Leu234Ala/Leu235Ala (LALA) mutation.

TABLE 21A
Exemplary Fc modifications

| Modification or mutation | Altered effector function |
|---|---|
| Leu235Glu | ADCC; |
| Leu234Ala/Leu235Ala (LALA) | ADCC; ADCP; CDC |
| Ser228Pro/Leu235Glu | |
| Leu234Ala/Leu235Ala/Pro329Gly | ADCP |
| Pro331Ser/Leu234Glu/Leu235Phe | CDC |
| Asp265Ala | ADCC, ADCP |
| Gly237Ala | ADCP |
| Glu318Ala | ADCP |
| Glu233Pro | |
| Gly236Arg/Leu328Arg | ADCC |
| His268Gln/Val309Leu/Ala330Ser/Pro331Ser | ADCC; ADCP; CDC |
| Val234Ala/Gly237Ala/Pro238Ser/ | ADCC; ADCP; CDC |
| His268Ala/Val309Leu/Ala330Ser/Pro331Ser | |
| Leu234Ala/L235Ala/Gly237Ala/P238Ser/ | ADCC; CDC |
| His268Ala/Ala330Ser/Pro33 ISer | |
| Ala330Leu | CDC |
| Asp270Ala | CDC |
| Lys322Ala | CDC |
| Pro329Ala | CDC |
| Pro331Ala | CDC |
| Val264Ala | CDC |
| High mannose glycosylation | CDC |
| Phe241Ala | CDC |
| Asn297Ala or Gly or Gln | ADCC; ADCP; CDC |
| S228P/Phe234Ala/Leu235Ala | ADCC; CDC |

### Natural Killer Cell Engagers

[0475] Natural Killer (NK) cells recognize and destroy tumors and virus-infected cells in an antibody-independent manner. The regulation of NK cells is mediated by activating and inhibiting receptors on the NK cell surface. One family of activating receptors is the natural cytotoxicity receptors (NCRs) which include NKp30, NKp44 and NKp46. The NCRs initiate tumor targeting by recognition of heparan sulfate on cancer cells. NKG2D is a receptor that provides both stimulatory and costimulatory innate immune responses on activated killer (NK) cells, leading to cytotoxic activity. DNAM1 is a receptor involved in intercellular adhesion, lymphocyte signaling, cytotoxicity and lymphokine secretion mediated by cytotoxic T-lymphocyte (CTL) and NK cell. DAP10 (also known as HCST) is a transmembrane adapter protein which associates with KLRK1 to form an activation receptor KLRK1-HCST in lymphoid and myeloid cells; this receptor plays a major role in triggering cytotoxicity against target cells expressing cell surface ligands such as MHC class I chain-related MICA and MICB, and U(optionally L1)6-binding proteins (ULBPs); it KLRK1-HCST receptor plays a role in immune surveillance against tumors and is required for cytolysis of tumors cells; indeed, melanoma cells that do not express KLRK1 ligands escape from immune surveillance mediated by NK cells. CD16 is a receptor for the Fc region of IgG, which binds complexed or aggregated IgG and also monomeric IgG and thereby mediates antibody-dependent cellular cytotoxicity (ADCC) and other antibody-dependent responses, such as phagocytosis.

[0476] The present disclosure provides, inter alia, multispecific (e.g., bi-, tri-, quad-specific) or multifunctional molecules, that are engineered to contain one or more NK cell engagers that mediate binding to and/or activation of an NK cell. Accordingly, in some embodiments, the NK cell engager is selected from an antigen binding domain or ligand that binds to (e.g., activates): NKp30, NKp40, NKp44, NKp46, NKG2D, DNAM1, DAP10, CD16 (e.g., CD16a, CD16b, or both), CRTAM, CD27, PSGL1, CD96, CD100 (SEMA4D), NKp80, CD244 (also known as SLAMF4 or 2B4), SLAMF6, SLAMF7, KIR2DS2, KIR2DS4, KIR3DS1, KIR2DS3, KIR2DS5, KIR2DS1, CD94, NKG2C, NKG2E, or CD160.

[0477] In another aspect, provided herein is an antibody molecule that comprises one or more NK cell engagers that mediate binding to and/or activation of an NK cell. In one aspect, provided herein is an antibody molecule that comprises an antigen binding domain or ligand that binds to (e.g., activates): NKp30, NKp40, NKp44, NKp46, NKG2D, DNAM1, DAP10, CD16 (e.g., CD16a, CD16b, or both), CRTAM, CD27, PSGL1, CD96, CD100 (SEMA4D), NKp80, CD244 (also known as SLAMF4 or 2B4), SLAMF6, SLAMF7, KIR2DS2, KIR2DS4, KIR3DS1, KIR2DS3, KIR2DS5, KIR2DS1, CD94, NKG2C, NKG2E, or CD160.

[0478] In some embodiments, the NK cell engager is an antigen binding domain that binds to NKp30 (e.g., NKp30 present, e.g., expressed or displayed, on the surface of an NK cell) and comprises any CDR amino acid sequence, framework region (FWR) amino acid sequence, or variable region amino acid sequence disclosed in Tables 7-10. In some embodiments, the NK cell engager is an antigen binding domain that binds to NKp30 (e.g., NKp30 present, e.g., expressed or displayed, on the surface of an NK cell) and comprises any CDR amino acid sequence, framework region (FWR) amino acid sequence, or variable region amino acid sequence disclosed in U.S. Pat. Nos. 6,979,546, 9,447,185, PCT Application No. WO2015121383A1, PCT Application No. WO2016110468A1, PCT Application No. WO2004056392A1, or U.S. Application Publication No. US20070231322A1, the sequences of which are hereby incorporated by reference. In some embodiments, binding of the NK cell engager, e.g., antigen binding domain that binds to NKp30, to the NK cell activates the NK cell. An antigen binding domain that binds to NKp30 (e.g., NKp30 present, e.g., expressed or displayed, on the surface of an NK cell) may be said to target NKp30, the NK cell, or both.

[0479] In some embodiments, the antigen binding domain that binds to NKp30 comprises one or more CDRs (e.g., VHCDR1, VHCDR2, VHCDR3, VLCDR1, VLCDR2, and/or VLCDR3) disclosed in Table 7, Table 18, or Table 8, or a sequence having at least 85%, 90%, 95%, or 99% identity thereto. In some embodiments, the antigen binding domain that binds to NKp30 comprises one or more framework regions (e.g., VHFWR1, VHFWR2, VHFWR3, VHFWR4, VLFWR1, VLFWR2, VLFWR3, and/or VLFWR4) disclosed in Table 7, Table 18, or Table 8, or a sequence having at least 85%, 90%, 95%, or 99% identity thereto. In some embodiments, the antigen binding domain that binds to NKp30 comprises a VH and/or a VL disclosed in Table 9, or a sequence having at least 85%, 90%, 95%, or 99% identity thereto. In some embodiments, any of the VH domains disclosed in Table 9 may be paired with any of the VL domains disclosed in Table 9 to form the antigen binding domain that binds to NKp30. In some embodiments, the antigen binding domain that binds to NKp30 comprises an amino acid sequence disclosed in Table 10, or a sequence having at least 85%, 90%, 95%, or 99% identity thereto.

[0480] In some embodiments, the antigen binding domain that binds to NKP30 comprises one or more CDRs (e.g., VHCDR1, VHCDR2, VHCDR3, VLCDR1, VLCDR2, and/or VLCDR3) disclosed in Table 8A and/or 8B, or a sequence having at least 85%, 90%, 95%, or 99% identity thereto. In some embodiments, the antigen binding domain that binds to NKP30 comprises one or more framework regions (e.g., VHFWR1, VHFWR2, VHFWR3, VHFWR4, VLFWR1, VLFWR2, VLFWR3, and/or VLFWR4) disclosed in Table 8A-1 or Table 8B-1, or a sequence having at least 85%, 90%, 95%, or 99% identity thereto. In some embodiments, the antigen binding domain that binds to NKP30 comprises a VH and/or a VL disclosed in Table 9, or a sequence having at least 85%, 90%, 95%, or 99% identity thereto.

[0481] In some embodiments, the antigen binding domain that binds to NKp30 comprises a VH comprising a heavy chain complementarity determining region 1 (VHCDR1), a VHCDR2, and a VHCDR3, and a VL comprising a light chain complementarity determining region 1 (VLCDR1), a VLCDR2, and a VLCDR3.

[0482] In some embodiments, the antigen binding domain that targets NKp30 comprises a VH comprising a heavy chain complementarity determining region 1 (VHCDR1) amino acid sequence of SEQ ID NO: 6000 (or a sequence with no more than 1, 2, 3, or 4 mutations, e.g., substitutions, additions, or deletions), a VHCDR2 amino acid sequence of SEQ ID NO: 6001 (or a sequence with no more than 1, 2, 3, or 4 mutations, e.g., substitutions, additions, or deletions), and/or a VHCDR3 amino acid sequence of SEQ ID NO: 6002 (or a sequence with no more than 1, 2, 3, or 4 mutations, e.g., substitutions, additions, or deletions). In some embodiments, the NKp30 antigen binding domain comprises a VH comprising a VHCDR1 amino acid sequence of SEQ ID NO: 6000, a VHCDR2 amino acid sequence of SEQ ID NO: 6001, and/or a VHCDR3 amino acid sequence of SEQ ID NO: 6002.

[0483] In some embodiments, the antigen binding domain that targets NKp30 comprises a VL comprising a light chain complementarity determining region 1 (VLCDR1) amino acid sequence of SEQ ID NO: 6063 (or a sequence with no more than 1, 2, 3, or 4 mutations, e.g., substitutions, additions, or deletions), a VLCDR2 amino acid sequence of SEQ ID NO: 6064 (or a sequence with no more than 1, 2, 3, or 4 mutations, e.g., substitutions, additions, or deletions), and/or a VLCDR3 amino acid sequence of SEQ ID NO: 6065 (or a sequence with no more than 1, 2, 3, or 4 mutations, e.g., substitutions, additions, or deletions). In some embodiments, the antigen binding domain that targets NKp30 comprises a VL comprising a VLCDR1 amino acid sequence of SEQ ID NO: 6063, a VLCDR2 amino acid sequence of SEQ ID NO: 6064, and a VLCDR3 amino acid sequence of SEQ ID NO: 6065.

[0484] In some embodiments, the antigen binding domain that targets NKp30 comprises a VH comprising a heavy chain complementarity determining region 1 (VHCDR1) amino acid sequence of SEQ ID NO: 6000 (or a sequence with no more than 1, 2, 3, or 4 mutations, e.g., substitutions, additions, or deletions), a VHCDR2 amino acid sequence of SEQ ID NO: 6001 (or a sequence with no more than 1, 2, 3, or 4 mutations, e.g., substitutions, additions, or deletions), and/or a VHCDR3 amino acid sequence of SEQ ID NO: 6002 (or a sequence with no more than 1, 2, 3, or 4 mutations, e.g., substitutions, additions, or deletions), and a VL comprising a light chain complementarity determining region 1 (VLCDR1) amino acid sequence of SEQ ID NO: 6063 (or a sequence with no more than 1, 2, 3, or 4 mutations, e.g., substitutions, additions, or deletions), a VLCDR2 amino acid sequence of SEQ ID NO: 6064 (or a sequence with no more than 1, 2, 3, or 4 mutations, e.g., substitutions, additions, or deletions), and/or a VLCDR3 amino acid sequence of SEQ ID NO: 6065 (or a sequence with no more than 1, 2, 3, or 4 mutations, e.g., substitutions, additions, or deletions). In some embodiments, the NKp30 antigen binding domain comprises a VH comprising a VHCDR1 amino acid sequence of SEQ ID NO: 6000, a VHCDR2 amino acid sequence of SEQ ID NO: 6001, and/or a VHCDR3 amino acid sequence of SEQ ID NO: 6002, and a VL comprising a VLCDR1 amino acid sequence of SEQ ID NO: 6063, a VLCDR2 amino acid sequence of SEQ ID NO: 6064, and a VLCDR3 amino acid sequence of SEQ ID NO: 6065.

[0485] In some embodiments, the antigen binding domain that targets NKp30 comprises a VH comprising a heavy chain complementarity determining region 1 (VHCDR1) amino acid sequence of SEQ ID NO: 6007 (or a sequence with no more than 1, 2, 3, or 4 mutations, e.g., substitutions, additions, or deletions), a VHCDR2 amino acid sequence of SEQ ID NO: 6008 (or a sequence with no more than 1, 2, 3, or 4 mutations, e.g., substitutions, additions, or deletions), and/or a VHCDR3 amino acid sequence of SEQ ID NO: 6009 (or a sequence with no more than 1, 2, 3, or 4 mutations, e.g., substitutions, additions, or deletions). In some embodiments, the NKp30 antigen binding domain comprises a VH comprising a VHCDR1 amino acid sequence of SEQ ID NO: 6007, a VHCDR2 amino acid sequence of SEQ ID NO: 6008, and/or a VHCDR3 amino acid sequence of SEQ ID NO: 6009.

[0486] In some embodiments, the antigen binding domain that targets NKp30 comprises a VL comprising a light chain complementarity determining region 1 (VLCDR1) amino acid sequence of SEQ ID NO: 6070 (or a sequence with no more than 1, 2, 3, or 4 mutations, e.g., substitutions, additions, or deletions), a VLCDR2 amino acid sequence of SEQ ID NO: 6071 (or a sequence with no more than 1, 2, 3, or 4 mutations, e.g., substitutions, additions, or deletions), and/or a VLCDR3 amino acid sequence of SEQ ID NO: 6072 (or a sequence with no more than 1, 2, 3, or 4 mutations, e.g., substitutions, additions, or deletions). In some embodiments, the antigen binding domain that targets NKp30 comprises a VL comprising a VLCDR1 amino acid sequence of SEQ ID NO: 6070, a VLCDR2 amino acid sequence of SEQ ID NO: 6071, and a VLCDR3 amino acid sequence of SEQ ID NO: 6072.

[0487] In some embodiments, the antigen binding domain that targets NKp30 comprises a VH comprising a heavy chain complementarity determining region 1 (VHCDR1) amino acid sequence of SEQ ID NO: 6007 (or a sequence with no more than 1, 2, 3, or 4 mutations, e.g., substitutions, additions, or deletions), a VHCDR2 amino acid sequence of SEQ ID NO: 6008 (or a sequence with no more than 1, 2, 3, or 4 mutations, e.g., substitutions, additions, or deletions), and/or a VHCDR3 amino acid sequence of SEQ ID NO: 6009 (or a sequence with no more than 1, 2, 3, or 4 mutations, e.g., substitutions, additions, or deletions), and a VL comprising a light chain complementarity determining region 1 (VLCDR1) amino acid sequence of SEQ ID NO: 6070 (or a sequence with no more than 1, 2, 3, or 4 mutations, e.g., substitutions, additions, or deletions), a VLCDR2 amino acid sequence of SEQ ID NO: 6071 (or a sequence with no more than 1, 2, 3, or 4 mutations, e.g., substitutions, additions, or deletions), and/or a VLCDR3 amino acid sequence of SEQ ID NO: 6072 (or a sequence with no more than 1, 2, 3, or 4 mutations, e.g., substitutions, additions, or deletions). In some embodiments, the NKp30 antigen binding domain comprises a VH comprising a VHCDR1 amino acid sequence of SEQ ID NO: 6007, a VHCDR2 amino acid sequence of SEQ ID NO: 6008, and/or a VHCDR3 amino acid sequence of SEQ ID NO: 6009, and a VL comprising a VLCDR1 amino acid sequence of SEQ ID NO: 6070, a VLCDR2 amino acid sequence of SEQ ID NO: 6071, and a VLCDR3 amino acid sequence of SEQ ID NO: 6072.

[0488] In some embodiments, the antigen binding domain that targets NKp30 comprises a VH comprising a heavy chain framework region 1 (VHFWR1) amino acid sequence of SEQ ID NO: 6003, a VHFWR2 amino acid sequence of SEQ ID NO: 6004, a VHFWR3 amino acid sequence of SEQ ID NO: 6005, and/or a VHFWR4 amino acid sequence of SEQ ID NO: 6006.

[0489] In some embodiments, the antigen binding domain that targets NKp30 comprises a VL comprising a light chain framework region 1 (VLFWR1) amino acid sequence of SEQ ID NO: 6066, a VLFWR2 amino acid sequence of SEQ ID NO: 6067, a VLFWR3 amino acid sequence of SEQ ID NO: 6068, and/or a VLFWR4 amino acid sequence of SEQ ID NO: 6069.

[0490] In some embodiments, the antigen binding domain that targets NKp30 comprises a VH comprising a heavy chain framework region 1 (VHFWR1) amino acid sequence of SEQ ID NO: 6003, a VHFWR2 amino acid sequence of SEQ ID NO: 6004, a VHFWR3 amino acid sequence of SEQ ID NO: 6005, and/or a VHFWR4 amino acid sequence of SEQ ID NO: 6006, and a VL comprising a light chain framework region 1 (VLFWR1) amino acid sequence of SEQ ID NO: 6066, a VLFWR2 amino acid sequence of SEQ ID NO: 6067, a VLFWR3 amino acid sequence of SEQ ID NO: 6068, and/or a VLFWR4 amino acid sequence of SEQ ID NO: 6069.

[0491] In some embodiments, the antigen binding domain that targets NKp30 comprises a VH comprising a VHFWR1 amino acid sequence of SEQ ID NO: 6003 (or a sequence with no more than 1, 2, 3, 4, 5, or 6 mutations, e.g., substitutions, additions, or deletions, therefrom), a VHFWR2 amino acid sequence of SEQ ID NO: 6004 (or a sequence with no more than 1, 2, 3, 4, 5, or 6 mutations, e.g., substitutions, additions, or deletions, therefrom), a VHFWR3 amino acid sequence of SEQ ID NO: 6005 (or a sequence with no more than 1, 2, 3, 4, 5, 6, 7, 8, 9, 10, or 11 mutations, e.g., substitutions, additions, or deletions), and/or a VHFWR4 amino acid sequence of SEQ ID NO: 6006.

[0492] In some embodiments, the antigen binding domain that targets NKp30 comprises a VL comprising a VLFWR1 amino acid sequence of SEQ ID NO: 6066 (or a sequence with no more than 1, 2, or 3 mutations, e.g., substitutions, additions, or deletions), a VLFWR2 amino acid sequence of SEQ ID NO: 6067 (or a sequence with no more than 1 mutation, e.g., substitution, addition, or deletion), a VLFWR3 amino acid sequence of SEQ ID NO: 6068 (or a sequence with no more than 1 mutation, e.g., substitution, addition, or deletion), and/or a VLFWR4 amino acid sequence of SEQ ID NO: 6069.

[0493] In some embodiments, the antigen binding domain that targets NKp30 comprises a VH comprising a VHFWR1 amino acid sequence of SEQ ID NO: 6003 (or a sequence with no more than 1, 2, 3, 4, 5, or 6 mutations, e.g., substitutions, additions, or deletions, therefrom), a VHFWR2 amino acid sequence of SEQ ID NO: 6004 (or a sequence with no more than 1, 2, 3, 4, 5, or 6 mutations, e.g., substitutions, additions, or deletions, therefrom), a VHFWR3 amino acid sequence of SEQ ID NO: 6005 (or a sequence with no more than 1, 2, 3, 4, 5, 6, 7, 8, 9, 10, or 11 mutations, e.g., substitutions, additions, or deletions), and/or a VHFWR4 amino acid sequence of SEQ ID NO: 6006, and a VL comprising a VLFWR1 amino acid sequence of SEQ ID NO: 6066 (or a sequence with no more than 1, 2, or 3 mutations, e.g., substitutions, additions, or deletions), a VLFWR2 amino acid sequence of SEQ ID NO: 6067 (or a sequence with no more than 1 mutation, e.g., substitution, addition, or deletion), a VLFWR3 amino acid sequence of SEQ ID NO: 6068 (or a sequence with no more than 1 mutation, e.g., substitution, addition, or deletion), and/or a VLFWR4 amino acid sequence of SEQ ID NO: 6069.

[0494] In some embodiments, the antigen binding domain that targets NKp30 comprises a VH comprising a heavy chain framework region 1 (VHFWR1) amino acid sequence of SEQ ID NO: 6010, a VHFWR2 amino acid sequence of SEQ ID NO: 6011, a VHFWR3 amino acid sequence of SEQ ID NO: 6012, and/or a VHFWR4 amino acid sequence of SEQ ID NO: 6013.

[0495] In some embodiments, the antigen binding domain that targets NKp30 comprises a VL comprising a light chain framework region 1 (VLFWR1) amino acid sequence of SEQ ID NO: 6073, a VLFWR2 amino acid sequence of SEQ ID NO: 6074, a VLFWR3 amino acid sequence of SEQ ID NO: 6075, and/or a VLFWR4 amino acid sequence of SEQ ID NO: 6076.

[0496] In some embodiments, the antigen binding domain that targets NKp30 comprises a VH comprising a heavy chain framework region 1 (VHFWR1) amino acid sequence of SEQ ID NO: 6010, a VHFWR2 amino acid sequence of SEQ ID NO: 6011, a VHFWR3 amino acid sequence of SEQ ID NO: 6012, and/or a VHFWR4 amino acid sequence of SEQ ID NO: 6013, and a VL comprising a light chain framework region 1 (VLFWR1) amino acid sequence of SEQ ID NO: 6073, a VLFWR2 amino acid sequence of SEQ ID NO: 6074, a VLFWR3 amino acid sequence of SEQ ID NO: 6075, and/or a VLFWR4 amino acid sequence of SEQ ID NO: 6076.

[0497] In some embodiments, the antigen binding domain that targets NKp30 comprises a VH comprising a VHFWR1 amino acid sequence of SEQ ID NO: 6010 (or a sequence with no more than 1, 2, 3, 4, 5, or 6 mutations, e.g., substitutions, additions, or deletions, therefrom), a VHFWR2 amino acid sequence of SEQ ID NO: 6011 (or a sequence with no more than 1, 2, 3, 4, 5, or 6 mutations, e.g., substitutions, additions, or deletions, therefrom), a VHFWR3 amino acid sequence of SEQ ID NO: 6012 (or a sequence with no more than 1, 2, 3, 4, 5, 6, 7, 8, 9, 10, or 11 mutations, e.g., substitutions, additions, or deletions), and/or a VHFWR4 amino acid sequence of SEQ ID NO: 6013.

[0498] In some embodiments, the antigen binding domain that targets NKp30 comprises a VL comprising a VLFWR1 amino acid sequence of SEQ ID NO: 6073 (or a sequence with no more than 1, 2, or 3 mutations, e.g., substitutions, additions, or deletions), a VLFWR2 amino acid sequence of SEQ ID NO: 6074 (or a sequence with no more than 1 mutation, e.g., substitution, addition, or deletion), a VLFWR3 amino acid sequence of SEQ ID NO: 6075 (or a sequence with no more than 1 mutation, e.g., substitution, addition, or deletion), and/or a VLFWR4 amino acid sequence of SEQ ID NO: 6076.

[0499] In some embodiments, the antigen binding domain that targets NKp30 comprises a VH comprising a VHFWR1 amino acid sequence of SEQ ID NO: 6010 (or a sequence with no more than 1, 2, 3, 4, 5, or 6 mutations, e.g., substitutions, additions, or deletions, therefrom), a VHFWR2 amino acid sequence of SEQ ID NO: 6011 (or a sequence with no more than 1, 2, 3, 4, 5, or 6 mutations, e.g., substitutions, additions, or deletions, therefrom), a VHFWR3 amino acid sequence of SEQ ID NO: 6012 (or a sequence with no more than 1, 2, 3, 4, 5, 6, 7, 8, 9, 10, or 11 mutations, e.g., substitutions, additions, or deletions), and/or a VHFWR4 amino acid sequence of SEQ ID NO: 6013, and a VL comprising a VLFWR1 amino acid sequence of SEQ ID NO: 6073 (or a sequence with no more than 1, 2, or 3 mutations, e.g., substitutions, additions, or deletions), a VLFWR2 amino acid sequence of SEQ ID NO: 6074 (or a sequence with no more than 1 mutation, e.g., substitution, addition, or deletion), a VLFWR3 amino acid sequence of SEQ ID NO: 6075 (or a sequence with no more than 1 mutation, e.g., substitution, addition, or deletion), and/or a VLFWR4 amino acid sequence of SEQ ID NO: 6076.

[0500] In some embodiments, the antigen binding domain that targets NKp30 comprises a VH comprising a heavy chain framework region 1 (VHFWR1) amino acid sequence of SEQ ID NO: 6014, a VHFWR2 amino acid sequence of SEQ ID NO: 6015, a VHFWR3 amino acid sequence of SEQ ID NO: 6016, and/or a VHFWR4 amino acid sequence of SEQ ID NO: 6017.

[0501] In some embodiments, the antigen binding domain that targets NKp30 comprises a VH comprising a VHFWR1 amino acid sequence of SEQ ID NO: 6014 (or a sequence with no more than 1, 2, 3, 4, 5, or 6 mutations, e.g., substitutions, additions, or deletions, therefrom), a VHFWR2 amino acid sequence of SEQ ID NO: 6015 (or a sequence with no more than 1, 2, 3, 4, 5, or 6 mutations, e.g., substitutions, additions, or deletions, therefrom), a VHFWR3 amino acid sequence of SEQ ID NO: 6016 (or a sequence with no more than 1, 2, 3, 4, 5, 6, 7, 8, 9, 10, or 11 mutations, e.g., substitutions, additions, or deletions), and/or a VHFWR4 amino acid sequence of SEQ ID NO: 6017.

[0502] In some embodiments, the antigen binding domain that targets NKp30 comprises a VL comprising a light chain framework region 1 (VLFWR1) amino acid sequence of SEQ ID NO: 6077, a VLFWR2 amino acid sequence of SEQ ID NO: 6078, a VLFWR3 amino acid sequence of SEQ ID NO: 6079, and/or a VLFWR4 amino acid sequence of SEQ ID NO: 6080.

[0503] In some embodiments, the antigen binding domain that targets NKp30 comprises a VL comprising a VLFWR1 amino acid sequence of SEQ ID NO: 6077 (or a sequence with no more than 1, 2, or 3 mutations, e.g., substitutions, additions, or deletions), a VLFWR2 amino acid sequence of SEQ ID NO: 6078 (or a sequence with no more than 1 mutation, e.g., substitution, addition, or deletion), a VLFWR3 amino acid sequence of SEQ ID NO: 6079 (or a sequence with no more than 1 mutation, e.g., substitution, addition, or deletion), and/or a VLFWR4 amino acid sequence of SEQ ID NO: 6080.

[0504] In some embodiments, the antigen binding domain that targets NKp30 comprises a VH comprising a heavy chain framework region 1 (VHFWR1) amino acid sequence of SEQ ID NO: 6018, a VHFWR2 amino acid sequence of SEQ ID NO: 6019, a VHFWR3 amino acid sequence of SEQ ID NO: 6020, and/or a VHFWR4 amino acid sequence of SEQ ID NO: 6021.

[0505] In some embodiments, the antigen binding domain that targets NKp30 comprises a VH comprising a VHFWR1 amino acid sequence of SEQ ID NO: 6018 (or a sequence with no more than 1, 2, 3, 4, 5, or 6 mutations, e.g., substitutions, additions, or deletions, therefrom), a VHFWR2 amino acid sequence of SEQ ID NO: 6019 (or a sequence with no more than 1, 2, 3, 4, 5, or 6 mutations, e.g., substitutions, additions, or deletions, therefrom), a VHFWR3 amino acid sequence of SEQ ID NO: 6020 (or a sequence with no more than 1, 2, 3, 4, 5, 6, 7, 8, 9, 10, or 11 mutations, e.g., substitutions, additions, or deletions), and/or a VHFWR4 amino acid sequence of SEQ ID NO: 6021.

[0506] In some embodiments, the antigen binding domain that targets NKp30 comprises a VL comprising a light chain framework region 1 (VLFWR1) amino acid sequence of SEQ ID NO: 6081, a VLFWR2 amino acid sequence of SEQ ID NO: 6082, a VLFWR3 amino acid sequence of SEQ ID NO: 6083, and/or a VLFWR4 amino acid sequence of SEQ ID NO: 6084.

[0507] In some embodiments, the antigen binding domain that targets NKp30 comprises a VL comprising a VLFWR1 amino acid sequence of SEQ ID NO: 6081 (or a sequence with no more than 1, 2, or 3 mutations, e.g., substitutions, additions, or deletions), a VLFWR2 amino acid sequence of SEQ ID NO: 6082 (or a sequence with no more than 1 mutation, e.g., substitution, addition, or deletion), a VLFWR3 amino acid sequence of SEQ ID NO: 6083 (or a sequence with no more than 1 mutation, e.g., substitution, addition, or deletion), and/or a VLFWR4 amino acid sequence of SEQ ID NO: 6084.

[0508] In some embodiments, the antigen binding domain that targets NKp30 comprises a VH comprising a heavy chain framework region 1 (VHFWR1) amino acid sequence of SEQ ID NO: 6022, a VHFWR2 amino acid sequence of SEQ ID NO: 6023, a VHFWR3 amino acid sequence of SEQ ID NO: 6024, and/or a VHFWR4 amino acid sequence of SEQ ID NO: 6025.

[0509] In some embodiments, the antigen binding domain that targets NKp30 comprises a VH comprising a VHFWR1 amino acid sequence of SEQ ID NO: 6022 (or a sequence with no more than 1, 2, 3, 4, 5, or 6 mutations, e.g., substitutions, additions, or deletions, therefrom), a VHFWR2 amino acid sequence of SEQ ID NO: 6023 (or a sequence with no more than 1, 2, 3, 4, 5, or 6 mutations, e.g., substitutions, additions, or deletions, therefrom), a VHFWR3 amino acid sequence of SEQ ID NO: 6024 (or a sequence with no more than 1, 2, 3, 4, 5, 6, 7, 8, 9, 10, or 11 mutations, e.g., substitutions, additions, or deletions), and/or a VHFWR4 amino acid sequence of SEQ ID NO: 6025.

[0510] In some embodiments, the antigen binding domain that targets NKp30 comprises a VL comprising a light chain framework region 1 (VLFWR1) amino acid sequence of SEQ ID NO: 6085, a VLFWR2 amino acid sequence of SEQ ID NO: 6086, a VLFWR3 amino acid sequence of SEQ ID NO: 6087, and/or a VLFWR4 amino acid sequence of SEQ ID NO: 6088.

[0511] In some embodiments, the antigen binding domain that targets NKp30 comprises a VL comprising a VLFWR1 amino acid sequence of SEQ ID NO: 6085 (or a sequence with no more than 1, 2, or 3 mutations, e.g., substitutions, additions, or deletions), a VLFWR2 amino acid sequence of SEQ ID NO: 6086 (or a sequence with no more than 1 mutation, e.g., substitution, addition, or deletion), a VLFWR3 amino acid sequence of SEQ ID NO: 6087 (or a sequence with no more than 1 mutation, e.g., substitution, addition, or deletion), and/or a VLFWR4 amino acid sequence of SEQ ID NO: 6088.

[0512] In some embodiments, the antigen binding domain that targets NKp30 comprises a VH comprising a heavy chain framework region 1 (VHFWR1) amino acid sequence of SEQ ID NO: 6026, a VHFWR2 amino acid sequence of SEQ ID NO: 6027, a VHFWR3 amino acid sequence of SEQ ID NO: 6028, and/or a VHFWR4 amino acid sequence of SEQ ID NO: 6029.

[0513] In some embodiments, the antigen binding domain that targets NKp30 comprises a VH comprising a VHFWR1 amino acid sequence of SEQ ID NO: 6026 (or a sequence with no more than 1, 2, 3, 4, 5, or 6 mutations, e.g., substitutions, additions, or deletions, therefrom), a VHFWR2 amino acid sequence of SEQ ID NO: 6027 (or a sequence with no more than 1, 2, 3, 4, 5, or 6 mutations, e.g., substitutions, additions, or deletions, therefrom), a VHFWR3 amino acid sequence of SEQ ID NO: 6028 (or a sequence with no more than 1, 2, 3, 4, 5, 6, 7, 8, 9, 10, or 11 mutations, e.g., substitutions, additions, or deletions), and/or a VHFWR4 amino acid sequence of SEQ ID NO: 6029.

[0514] In some embodiments, the antigen binding domain that targets NKp30 comprises a VL comprising a light chain framework region 1 (VLFWR1) amino acid sequence of SEQ ID NO: 6089, a VLFWR2 amino acid sequence of SEQ ID NO: 6090, a VLFWR3 amino acid sequence of SEQ ID NO: 6091, and/or a VLFWR4 amino acid sequence of SEQ ID NO: 6092.

[0515] In some embodiments, the antigen binding domain that targets NKp30 comprises a VL comprising a VLFWR1 amino acid sequence of SEQ ID NO: 6089 (or a sequence with no more than 1, 2, or 3 mutations, e.g., substitutions, additions, or deletions), a VLFWR2 amino acid sequence of SEQ ID NO: 6090 (or a sequence with no more than 1 mutation, e.g., substitution, addition, or deletion), a VLFWR3 amino acid sequence of SEQ ID NO: 6091 (or a sequence with no more than 1 mutation, e.g., substitution, addition, or deletion), and/or a VLFWR4 amino acid sequence of SEQ ID NO: 6092.

[0516] In some embodiments, the antigen binding domain that targets NKp30 comprises a VH comprising a heavy chain framework region 1 (VHFWR1) amino acid sequence of SEQ ID NO: 6030, a VHFWR2 amino acid sequence of SEQ ID NO: 6032, a VHFWR3 amino acid sequence of SEQ ID NO: 6033, and/or a VHFWR4 amino acid sequence of SEQ ID NO: 6034.

[0517] In some embodiments, the antigen binding domain that targets NKp30 comprises a VH comprising a VHFWR1 amino acid sequence of SEQ ID NO: 6030 (or a sequence with no more than 1, 2, 3, 4, 5, or 6 mutations, e.g., substitutions, additions, or deletions, therefrom), a VHFWR2 amino acid sequence of SEQ ID NO: 6032 (or a sequence with no more than 1, 2, 3, 4, 5, or 6 mutations, e.g., substitutions, additions, or deletions, therefrom), a VHFWR3 amino acid sequence of SEQ ID NO: 6033 (or a sequence with no more than 1, 2, 3, 4, 5, 6, 7, 8, 9, 10, or 11 mutations, e.g., substitutions, additions, or deletions), and/or a VHFWR4 amino acid sequence of SEQ ID NO: 6034.

[0518] In some embodiments, the antigen binding domain that targets NKp30 comprises a VL comprising a light chain framework region 1 (VLFWR1) amino acid sequence of SEQ ID NO: 6093, a VLFWR2 amino acid sequence of SEQ ID NO: 6094, a VLFWR3 amino acid sequence of SEQ ID NO: 6095, and/or a VLFWR4 amino acid sequence of SEQ ID NO: 6096.

[0519] In some embodiments, the antigen binding domain that targets NKp30 comprises a VL comprising a VLFWR1 amino acid sequence of SEQ ID NO: 6093 (or a sequence with no more than 1, 2, or 3 mutations, e.g., substitutions, additions, or deletions), a VLFWR2 amino acid sequence of SEQ ID NO: 6094 (or a sequence with no more than 1 mutation, e.g., substitution, addition, or deletion), a VLFWR3 amino acid sequence of SEQ ID NO: 6095 (or a sequence with no more than 1 mutation, e.g., substitution, addition, or deletion), and/or a VLFWR4 amino acid sequence of SEQ ID NO: 6096.

[0520] In some embodiments, the antigen binding domain that targets NKp30 comprises a VH comprising a heavy chain framework region 1 (VHFWR1) amino acid sequence of SEQ ID NO: 6035, a VHFWR2 amino acid sequence of SEQ ID NO: 6036, a VHFWR3 amino acid sequence of SEQ ID NO: 6037, and/or a VHFWR4 amino acid sequence of SEQ ID NO: 6038.

[0521] In some embodiments, the antigen binding domain that targets NKp30 comprises a VH comprising a VHFWR1 amino acid sequence of SEQ ID NO: 6035 (or a sequence with no more than 1, 2, 3, 4, 5, or 6 mutations, e.g., substitutions, additions, or deletions, therefrom), a VHFWR2 amino acid sequence of SEQ ID NO: 6036 (or a sequence with no more than 1, 2, 3, 4, 5, or 6 mutations, e.g., substitutions, additions, or deletions, therefrom), a VHFWR3 amino acid sequence of SEQ ID NO: 6037 (or a sequence with no more than 1, 2, 3, 4, 5, 6, 7, 8, 9, 10, or 11 mutations, e.g., substitutions, additions, or deletions), and/or a VHFWR4 amino acid sequence of SEQ ID NO: 6038.

[0522] In some embodiments, the antigen binding domain that targets NKp30 comprises a VH comprising a heavy chain framework region 1 (VHFWR1) amino acid sequence of SEQ ID NO: 6039, a VHFWR2 amino acid sequence of SEQ ID NO: 6040, a VHFWR3 amino acid sequence of SEQ ID NO: 6041, and/or a VHFWR4 amino acid sequence of SEQ ID NO: 6042.

[0523] In some embodiments, the antigen binding domain that targets NKp30 comprises a VH comprising a VHFWR1 amino acid sequence of SEQ ID NO: 6039 (or a sequence with no more than 1, 2, 3, 4, 5, or 6 mutations, e.g., substitutions, additions, or deletions, therefrom), a VHFWR2 amino acid sequence of SEQ ID NO: 6040 (or a sequence with no more than 1, 2, 3, 4, 5, or 6 mutations, e.g., substitutions, additions, or deletions, therefrom), a VHFWR3 amino acid sequence of SEQ ID NO: 6041 (or a sequence with no more than 1, 2, 3, 4, 5, 6, 7, 8, 9, 10, or 11 mutations, e.g., substitutions, additions, or deletions), and/or a VHFWR4 amino acid sequence of SEQ ID NO: 6042.

[0524] In some embodiments, the antigen binding domain that targets NKp30 comprises a VL comprising a light chain framework region 1 (VLFWR1) amino acid sequence of SEQ ID NO: 6097, a VLFWR2 amino acid sequence of SEQ ID NO: 6098, a VLFWR3 amino acid sequence of SEQ ID NO: 6099, and/or a VLFWR4 amino acid sequence of SEQ ID NO: 6100.

[0525] In some embodiments, the antigen binding domain that targets NKp30 comprises a VL comprising a VLFWR1 amino acid sequence of SEQ ID NO: 6097 (or a sequence with no more than 1, 2, or 3 mutations, e.g., substitutions, additions, or deletions), a VLFWR2 amino acid sequence of SEQ ID NO: 6098 (or a sequence with no more than 1 mutation, e.g., substitution, addition, or deletion), a VLFWR3 amino acid sequence of SEQ ID NO: 6099 (or a sequence with no more than 1 mutation, e.g., substitution, addition, or deletion), and/or a VLFWR4 amino acid sequence of SEQ ID NO: 6100.

[0526] In some embodiments, the antigen binding domain that targets NKp30 comprises a VH comprising a heavy chain framework region 1 (VHFWR1) amino acid sequence of SEQ ID NO: 6043, a VHFWR2 amino acid sequence of SEQ ID NO: 6044, a VHFWR3 amino acid sequence of SEQ ID NO: 6045, and/or a VHFWR4 amino acid sequence of SEQ ID NO: 6046.

[0527] In some embodiments, the antigen binding domain that targets NKp30 comprises a VH comprising a VHFWR1 amino acid sequence of SEQ ID NO: 6043 (or a sequence with no more than 1, 2, 3, 4, 5, or 6 mutations, e.g., substitutions, additions, or deletions, therefrom), a VHFWR2 amino acid sequence of SEQ ID NO: 6044 (or a sequence with no more than 1, 2, 3, 4, 5, or 6 mutations, e.g., substitutions, additions, or deletions, therefrom), a VHFWR3 amino acid sequence of SEQ ID NO: 6045 (or a sequence with no more than 1, 2, 3, 4, 5, 6, 7, 8, 9, 10, or 11 mutations, e.g., substitutions, additions, or deletions), and/or a VHFWR4 amino acid sequence of SEQ ID NO: 6046.

[0528] In some embodiments, the antigen binding domain that targets NKp30 comprises a VL comprising a light chain framework region 1 (VLFWR1) amino acid sequence of SEQ ID NO: 6101, a VLFWR2 amino acid sequence of SEQ ID NO: 6102, a VLFWR3 amino acid sequence of SEQ ID NO: 6103, and/or a VLFWR4 amino acid sequence of SEQ ID NO: 6104.

[0529] In some embodiments, the antigen binding domain that targets NKp30 comprises a VL comprising a VLFWR1 amino acid sequence of SEQ ID NO: 6101 (or a sequence with no more than 1, 2, or 3 mutations, e.g., substitutions, additions, or deletions), a VLFWR2 amino acid sequence of SEQ ID NO: 6102 (or a sequence with no more than 1 mutation, e.g., substitution, addition, or deletion), a VLFWR3 amino acid sequence of SEQ ID NO: 6103 (or a sequence with no more than 1 mutation, e.g., substitution, addition, or deletion), and/or a VLFWR4 amino acid sequence of SEQ ID NO: 6104.

[0530] In some embodiments, the antigen binding domain that targets NKp30 comprises a VH comprising a heavy chain framework region 1 (VHFWR1) amino acid sequence of SEQ ID NO: 6047, a VHFWR2 amino acid sequence of SEQ ID NO: 6048, a VHFWR3 amino acid sequence of SEQ ID NO: 6049, and/or a VHFWR4 amino acid sequence of SEQ ID NO: 6050.

[0531] In some embodiments, the antigen binding domain that targets NKp30 comprises a VH comprising a VHFWR1 amino acid sequence of SEQ ID NO: 6047 (or a sequence with no more than 1, 2, 3, 4, 5, or 6 mutations, e.g., substitutions, additions, or deletions, therefrom), a VHFWR2 amino acid sequence of SEQ ID NO: 6048 (or a sequence with no more than 1, 2, 3, 4, 5, or 6 mutations, e.g., substitutions, additions, or deletions, therefrom), a VHFWR3 amino acid sequence of SEQ ID NO: 6049 (or a sequence with no more than 1, 2, 3, 4, 5, 6, 7, 8, 9, 10, or 11 mutations, e.g., substitutions, additions, or deletions), and/or a VHFWR4 amino acid sequence of SEQ ID NO: 6050.

[0532] In some embodiments, the antigen binding domain that targets NKp30 comprises a VL comprising a light chain framework region 1 (VLFWR1) amino acid sequence of SEQ ID NO: 6105, a VLFWR2 amino acid sequence of SEQ ID NO: 6106, a VLFWR3 amino acid sequence of SEQ ID NO: 6107, and/or a VLFWR4 amino acid sequence of SEQ ID NO: 6108.

[0533] In some embodiments, the antigen binding domain that targets NKp30 comprises a VL comprising a VLFWR1 amino acid sequence of SEQ ID NO: 6105 (or a sequence with no more than 1, 2, or 3 mutations, e.g., substitutions, additions, or deletions), a VLFWR2 amino acid sequence of SEQ ID NO: 6106 (or a sequence with no more than 1 mutation, e.g., substitution, addition, or deletion), a VLFWR3 amino acid sequence of SEQ ID NO: 6107 (or a sequence with no more than 1 mutation, e.g., substitution, addition, or deletion), and/or a VLFWR4 amino acid sequence of SEQ ID NO: 6108.

[0534] In some embodiments, the antigen binding domain that targets NKp30 comprises a VH comprising a heavy chain framework region 1 (VHFWR1) amino acid sequence of SEQ ID NO: 6051, a VHFWR2 amino acid sequence of SEQ ID NO: 6052, a VHFWR3 amino acid sequence of SEQ ID NO: 6053, and/or a VHFWR4 amino acid sequence of SEQ ID NO: 6054.

[0535] In some embodiments, the antigen binding domain that targets NKp30 comprises a VH comprising a VHFWR1 amino acid sequence of SEQ ID NO: 6051 (or a sequence with no more than 1, 2, 3, 4, 5, or 6 mutations, e.g., substitutions, additions, or deletions, therefrom), a VHFWR2 amino acid sequence of SEQ ID NO: 6052 (or a sequence with no more than 1, 2, 3, 4, 5, or 6 mutations, e.g., substitutions, additions, or deletions, therefrom), a VHFWR3 amino acid sequence of SEQ ID NO: 6053 (or a sequence with no more than 1, 2, 3, 4, 5, 6, 7, 8, 9, 10, or 11 mutations, e.g., substitutions, additions, or deletions), and/or a VHFWR4 amino acid sequence of SEQ ID NO: 6054.

[0536] In some embodiments, the antigen binding domain that targets NKp30 comprises a VL comprising a light chain framework region 1 (VLFWR1) amino acid sequence of SEQ ID NO: 6109, a VLFWR2 amino acid sequence of SEQ ID NO: 6110, a VLFWR3 amino acid sequence of SEQ ID NO: 6111, and/or a VLFWR4 amino acid sequence of SEQ ID NO: 6112.

[0537] In some embodiments, the antigen binding domain that targets NKp30 comprises a VL comprising a VLFWR1 amino acid sequence of SEQ ID NO: 6109 (or a sequence with no more than 1, 2, or 3 mutations, e.g., substitutions, additions, or deletions), a VLFWR2 amino acid sequence of SEQ ID NO: 6110 (or a sequence with no more than 1 mutation, e.g., substitution, addition, or deletion), a VLFWR3 amino acid sequence of SEQ ID NO: 6111 (or a sequence with no more than 1 mutation, e.g., substitution, addition, or deletion), and/or a VLFWR4 amino acid sequence of SEQ ID NO: 6112.

[0538] In some embodiments, the antigen binding domain that targets NKp30 comprises a VH comprising a heavy chain framework region 1 (VHFWR1) amino acid sequence of SEQ ID NO: 6055, a VHFWR2 amino acid sequence of SEQ ID NO: 6056, a VHFWR3 amino acid sequence of SEQ ID NO: 6057, and/or a VHFWR4 amino acid sequence of SEQ ID NO: 6058.

[0539] In some embodiments, the antigen binding domain that targets NKp30 comprises a VH comprising a VHFWR1 amino acid sequence of SEQ ID NO: 6055 (or a sequence with no more than 1, 2, 3, 4, 5, or 6 mutations, e.g., substitutions, additions, or deletions, therefrom), a VHFWR2 amino acid sequence of SEQ ID NO: 6056 (or a sequence with no more than 1, 2, 3, 4, 5, or 6 mutations, e.g., substitutions, additions, or deletions, therefrom), a VHFWR3 amino acid sequence of SEQ ID NO: 6057 (or a sequence with no more than 1, 2, 3, 4, 5, 6, 7, 8, 9, 10, or 11 mutations, e.g., substitutions, additions, or deletions), and/or a VHFWR4 amino acid sequence of SEQ ID NO: 6058.

[0540] In some embodiments, the antigen binding domain that targets NKp30 comprises a VL comprising a light chain framework region 1 (VLFWR1) amino acid sequence of SEQ ID NO: 6113, a VLFWR2 amino acid sequence of SEQ ID NO: 6114, a VLFWR3 amino acid sequence of SEQ ID NO: 6115, and/or a VLFWR4 amino acid sequence of SEQ ID NO: 6116.

[0541] In some embodiments, the antigen binding domain that targets NKp30 comprises a VL comprising a VLFWR1 amino acid sequence of SEQ ID NO: 6113 (or a sequence with no more than 1, 2, or 3 mutations, e.g., substitutions, additions, or deletions), a VLFWR2 amino acid sequence of SEQ ID NO: 6114 (or a sequence with no more than 1 mutation, e.g., substitution, addition, or deletion), a VLFWR3 amino acid sequence of SEQ ID NO: 6115 (or a sequence with no more than 1 mutation, e.g., substitution, addition, or deletion), and/or a VLFWR4 amino acid sequence of SEQ ID NO: 6116.

[0542] In some embodiments, the antigen binding domain that targets NKp30 comprises a VH comprising a heavy chain framework region 1 (VHFWR1) amino acid sequence of SEQ ID NO: 6059, a VHFWR2 amino acid sequence of SEQ ID NO: 6060, a VHFWR3 amino acid sequence of SEQ ID NO: 6061, and/or a VHFWR4 amino acid sequence of SEQ ID NO: 6062.

[0543] In some embodiments, the antigen binding domain that targets NKp30 comprises a VH comprising a VHFWR1 amino acid sequence of SEQ ID NO: 6059 (or a sequence with no more than 1, 2, 3, 4, 5, or 6 mutations, e.g., substitutions, additions, or deletions, therefrom), a VHFWR2 amino acid sequence of SEQ ID NO: 6060 (or a sequence with no more than 1, 2, 3, 4, 5, or 6 mutations, e.g., substitutions, additions, or deletions, therefrom), a VHFWR3 amino acid sequence of SEQ ID NO: 6061 (or a sequence with no more than 1, 2, 3, 4, 5, 6, 7, 8, 9, 10, or 11 mutations, e.g., substitutions, additions, or deletions), and/or a VHFWR4 amino acid sequence of SEQ ID NO: 6062.

[0544] In some embodiments, the antigen binding domain that targets NKp30 comprises a VL comprising a light chain framework region 1 (VLFWR1) amino acid sequence of SEQ ID NO: 6117, a VLFWR2 amino acid sequence of SEQ ID NO: 6118, a VLFWR3 amino acid sequence of SEQ ID NO: 6119, and/or a VLFWR4 amino acid sequence of SEQ ID NO: 6120.

[0545] In some embodiments, the antigen binding domain that targets NKp30 comprises a VL comprising a VLFWR1 amino acid sequence of SEQ ID NO: 6117 (or a sequence with no more than 1, 2, or 3 mutations, e.g., substitutions, additions, or deletions), a VLFWR2 amino acid sequence of SEQ ID NO: 6118 (or a sequence with no more than 1 mutation, e.g., substitution, addition, or deletion), a VLFWR3 amino acid sequence of SEQ ID NO: 6119 (or a sequence with no more than 1 mutation, e.g., substitution, addition, or deletion), and/or a VLFWR4 amino acid sequence of SEQ ID NO: 6120.

[0546] In some embodiments, the antigen binding domain that targets NKp30 comprises a VH comprising the amino acid sequence of SEQ ID NO: 6148 (or an amino acid sequence having at least about 77%, 80%, 85%, 90%, 95%, or 99% sequence identity to SEQ ID NO: 6148). In some embodiments, the antigen binding domain that targets NKp30 comprises a VH comprising the amino acid sequence of SEQ ID NO: 6149 (or an amino acid sequence having at least about 77%, 80%, 85%, 90%, 95%, or 99% sequence identity to SEQ ID NO: 6149). In some embodiments, the antigen binding domain that targets NKp30 comprises a VL comprising the amino acid sequence of SEQ ID NO: 6150 (or an amino acid sequence having at least about 93%, 95%, or 99% sequence identity to SEQ ID NO: 6150). In some embodiments, antigen binding domain that targets NKp30 comprises a VH comprising the amino acid sequence of SEQ ID NO: 6148. In some embodiments, antigen binding domain that targets NKp30 comprises a VH comprising the amino acid sequence of SEQ ID NO: 6149. In some embodiments, the antigen binding domain that targets NKp30 comprises a VL comprising the amino acid sequence of SEQ ID NO: 6150.

[0547] In some embodiments, the antigen binding domain that targets NKp30 comprises a VH comprising the amino acid sequence of SEQ ID NO: 6148, and a VL comprising the amino acid sequence of SEQ ID NO: 6150. In some embodiments, the antigen binding domain that targets NKp30 comprises a VH comprising the amino acid sequence of SEQ ID NO: 6149, and a VL comprising the amino acid sequence of SEQ ID NO: 6150.

[0548] In some embodiments, the antigen binding domain that targets NKp30 comprises a VH comprising the amino acid sequence of SEQ ID NO: 6151 (or an amino acid sequence having at least about 77%, 80%, 85%, 90%, 95%, or 99% sequence identity to SEQ ID NO: 6151). In some embodiments, the antigen binding domain that targets NKp30 comprises a VH comprising the amino acid sequence of SEQ ID NO: 6152 (or an amino acid sequence having at least about 77%, 80%, 85%, 90%, 95%, or 99% sequence identity to SEQ ID NO: 6152). In some embodiments, the antigen binding domain that targets NKp30 comprises a VL comprising the amino acid sequence of SEQ ID NO: 6153 (or an amino acid sequence having at least about 93%, 95%, or 99% sequence identity to SEQ ID NO: 6153). In some embodiments, antigen binding domain that targets NKp30 comprises a VH comprising the amino acid sequence of SEQ ID NO: 6151. In some embodiments, antigen binding domain that targets NKp30 comprises a VH comprising the amino acid sequence of SEQ ID NO: 6152. In some embodiments, the antigen binding domain that targets NKp3 comprises a VL comprising the amino acid sequence of SEQ ID NO: 6153.

[0549] In some embodiments, the antigen binding domain that targets NKp30 comprises a VH comprising the amino acid sequence of SEQ ID NO: 6151, and a VL comprising the amino acid sequence of SEQ ID NO: 6153. In some embodiments, the antigen binding domain that targets NKp30 comprises a VH comprising the amino acid sequence of SEQ ID NO: 6152, and a VL comprising the amino acid sequence of SEQ ID NO: 6153.

[0550] In some embodiments, the antigen binding domain that targets NKp30 comprises an scFv. In some embodiments, the scFv comprises an amino acid sequence selected from SEQ ID NOs: 6187-6190, or an amino acid sequence having at least about 93%, 95%, or 99% sequence identity thereto.

TABLE 7
Exemplary heavy chain CDRs and FWRs of NKp3 O-targeting antigen
binding domains

| Ab ID | VHFWR1 | VHCDR1 | VHFWR2 | VHCDR2 | VHFWR3 | VHCDR3 | VHFWR4 |
|---|---|---|---|---|---|---|---|
| 9G1- | QIQLQESGP | TGGYH | WIRQFP | YIYSSGS | RISITRDTS | GNWHY | WGQGT |
| HC | GLVKPSQS | WN | GKKLEW | TSYNPS | KNQFFLQL | FDF | MVTVSS |
| | LSLTCSVT | (SEQ ID | MG | LKS | NSVTTEDT | (SEQ ID | (SEQ ID |
| | GFSIN | NO: 6000) | (SEQ ID | (SEQ ID | ATYYCAR | NO: 6002) | NO: 6006) |
| | (SEQ ID | | NO: 6004) | NO: 6001) | (SEQ ID | | |
| | NO: 6003) | | | | NO: 6005) | | |
| 15H6- | QIQLQESGP | TGGYH | WIRQFP | YIYSSGT | RISITRDTS | GNWHY | WGQGTL |
| HC | GLVKPSQS | WN | GKKLEW | TRYNPS | KNQFFLQL | FDY | VAVSS |
| | LSLTCSVT | (SEQ ID | MG | LKS | NSVTPEDT | (SEQ ID | (SEQ ID |
| | GFSIN | NO: 6007) | (SEQ ID | (SEQ ID | ATYYCTR | NO: 6009) | NO: 6013) |
| | (SEQ ID | | NO: 6011) | NO: 6008) | (SEQ ID | | |
| | NO: 6010) | | | | NO: 6012) | | |
| 9G1- | QIQLQESGP | TGGYH | WIRQPA | YIYSSGS | RVTMSRDT | GNWHY | WGQGT |
| HC_1 | GLVKPSET | WN | GKGLEW | TSYNPS | SKNQFSLK | FDF | MVTVSS |
| | LSLTCTVS | (SEQ ID | IG | LKS | LSSVTAAD | (SEQ ID | (SEQ ID |
| | GFSIN | NO: 6000) | (SEQ ID | (SEQ ID | TAVYYCAR | NO: 6002) | NO: 6017) |
| | (SEQ ID | | NO: 6015) | NO: 6001) | (SEQ ID | | |
| | NO: 6014) | | | | NO: 6016) | | |
| 9G1- | QIQLQESGP | TGGYH | WIRQHP | YIYSSGS | LVTISRDTS | GNWHY | WGQGT |
| HC_2 | GLVKPSQT | WN | GKGLEW | TSYNPS | KNQFSLKL | FDF | MVTVSS |
| | LSLTCTVS | (SEQ ID | IG | LKS | SSVTAADT | (SEQ ID | (SEQ ID |
| | GFSIN | NO: 6000) | (SEQ ID | (SEQ ID | AVYYCAR | NO: 6002) | NO: 6021) |
| | (SEQ ID | | NO: 6019) | NO: 6001) | (SEQ ID | | |
| | NO: 6018) | | | | NO: 6020) | | |
| 9G1- | EIQLLESGG | TGGYH | WVRQAP | YIYSSGS | RFTISRDTS | GNWHY | WGQGT |
| HC_3 | GLVQPGGS | WN | GKGLEW | TSYNPS | KNTFYLQM | FDF | MVTVSS |
| | LRLSCAVS | (SEQ ID | VG | LKS | NSLRAEDT | (SEQ ID | (SEQ ID |
| | GFSIN | NO: 6000) | (SEQ ID | (SEQ ID | AVYYCAR | NO: 6002) | NO: 6025) |
| | (SEQ ID | | NO: 6023) | NO: 6001) | (SEQ ID | | |
| | NO: 6022) | | | | NO: 6024) | | |
| 9G1- | QIQLVQSG | TGGYH | WVRQAP | YIYSSGS | RVTITRDTS | GNWHY | WGQGT |
| HC_4 | AEVKKPGS | WN | GQGLEW | TSYNPS | TNTFYMEL | FDF | MVTVSS |
| | SVKVSCKV | (SEQ ID | MG | LKS | SSLRSEDT | (SEQ ID | (SEQ ID |
| | SGFSIN | NO: 6000) | (SEQ ID | (SEQ ID | AVYYCAR | NO: 6002) | NO: 6029) |
| | (SEQ ID | | NO: 6027) | NO: 6001) | (SEQ ID | | |
| | NO: 6026) | | | | NO: 6028) | | |
| 9G1- | EIQLVESG | TGGYH | WVRQAP | YIYSSGS | RFTISRDTA | GNWHY | WGQGT |
| HC_5 | GGLVQPGG | WN | GKGLEW | TSYNPS | KNSFYLQM | FDF | MVTVSS |
| | SLRLSCAV | (SEQ ID | VG | LKS | NSLRAEDT | (SEQ ID | (SEQ ID |
| | SGFSIN | NO: 6000) | (SEQ ID | (SEQ ID | AVYYCAR | NO: 6002) | NO: 6034) |
| | (SEQ ID | | NO: 6032) | NO: 6001) | (SEQ ID | | |
| | NO: 6030) | | | | NO: 6033) | | |
| 9G1- | QIQLVQSG | TGGYH | WVRQAP | YIYSSGS | RVTMTRDT | GNWHY | WGQGT |
| HC_6 | AEVKKPGA | WN | GQGLEW | TSYNPS | STNTFYME | FDF | MVTVSS |
| | SVKVSCKV | (SEQ ID | MG | LKS | LSSLRSEDT | (SEQ ID | (SEQ ID |
| | SGFSIN | NO: 6000) | (SEQ ID | (SEQ ID | AVYYCAR | NO: 6002) | NO: 6038) |
| | (SEQ ID | | NO: 6036) | NO: 6001) | (SEQ ID | | |
| | NO: 6035) | | | | NO: 6037) | | |
| 15H6- | QIQLQESGP | TGGYH | WIRQHP | YIYSSGT | LVTISRDTS | GNWHY | WGQGTL |
| HC_1 | GLVKPSQT | WN | GKGLEW | TRYNPS | KNQFSLKL | FDY | VTVSS |
| | LSLTCTVS | (SEQ ID | IG | LKS | SSVTAADT | (SEQ ID | (SEQ ID |
| | GFSIN | NO: 6007) | (SEQ ID | (SEQ ID | AVYYCAR | NO: 6009) | NO: 6042) |
| | (SEQ ID | | NO: 6040) | NO: 6008) | (SEQ ID | | |
| | NO: 6039) | | | | NO: 6041) | | |
| 15H6- | QIQLQESGP | TGGYH | WIRQPA | YIYSSGT | RVTMSRDT | GNWHY | WGQGTL |
| HC_2 | GLVKPSET | WN | GKGLEW | TRYNPS | SKNQFSLK | FDY | VTVSS |
| | LSLTCTVS | (SEQ ID | IG | LKS | LSSVTAAD | (SEQ ID | (SEQ ID |
| | GFSIN | NO: 6007) | (SEQ ID | (SEQ ID | TAVYYCAR | NO: 6009) | NO: 6046) |
| | (SEQ ID | | NO: 6044) | NO: 6008) | (SEQ ID | | |
| | NO: 6043) | | | | NO: 6045) | | |
| 15H6- | EIQLLESGG | TGGYH | WVRQAP | YIYSSGT | RFTISRDTS | GNWHY | WGQGTL |
| HC_3 | GLVQPGGS | WN | GKGLEW | TRYNPS | KNTFYLQM | FDY | VTVSS |
| | LRLSCAVS | (SEQ ID | VG | LKS | NSLRAEDT | (SEQ ID | (SEQ ID |
| | GFSIN | NO: 6007) | (SEQ ID | (SEQ ID | AVYYCAR | NO: 6009) | NO: 6050) |
| | (SEQ ID | | NO: 6048) | NO: 6008) | (SEQ ID | | |
| | NO: 6047) | | | | NO: 6049) | | |
| 15H6- | QIQLVESG | TGGYH | WIRQAP | YIYSSGT | RFTISRDTA | GNWHY | WGQGTL |
| HC_4 | GGLVKPGG | WN | GKGLEW | TRYNPS | KNSFYLQM | FDY | VTVSS |
| | SLRLSCAV | (SEQ ID | VG | LKS | NSLRAEDT | (SEQ ID | (SEQ ID |
| | SGFSIN | NO: 6007) | (SEQ ID | (SEQ ID | AVYYCAR | NO: 6009) | NO: 6054) |
| | (SEQ ID | | NO:6052) | NO: 6008) | (SEQ ID | | |
| | NO: 6051) | | | | NO: 6053) | | |
| 15H6- | QIQLVQSG | TGGYH | WVRQAP | YIYSSGT | RVTMTRDT | GNWHY | WGQGTL |
| HC_5 | AEVKKPGA | WN | GQGLEW | TRYNPS | STNTFYME | FDY | VTVSS |
| | SVKVSCKV | (SEQ ID | MG | LKS | LSSLRSEDT | (SEQ ID | (SEQ ID |
| | SGFSIN | NO: 6007) | (SEQ ID | (SEQ ID | AVYYCAR | NO: 6009) | NO: 6058) |
| | (SEQ ID | | NO: 6056) | NO: 6008) | (SEQ ID | | |
| | NO: 6055) | | | | NO: 6057) | | |
| 15H6- | EIQLVQSG | TGGYH | WVQQA | YIYSSGT | RVTITRDTS | GNWHY | WGQGTL |
| HC_6 | AEVKKPGA | WN | PGKGLE | TRYNPS | TNTFYMEL | FDY | VTVSS |
| | TVKISCKV | (SEQ ID | WMG | LKS | SSLRSEDT | (SEQ ID | (SEQ ID |
| | SGFSIN | NO: 6007) | (SEQ ID | (SEQ ID | AVYYCAR | NO: 6009) | NO: 6062) |
| | (SEQ ID | | NO: 6060) | NO: 6008) | (SEQ ID | | |
| | NO: 6059) | | | | NO: 6061) | | |
| BJM04 | EIQLLESGG | TTGYH | WVRQAP | YIYSSGS | RFTISRDTS | GDWHY | WGQGT |
| 11 VH | GLVQPGGS | WN | GKGLEW | TSYNPS | KNTFYLQM | FDY | MVTVSS |
| | LRLSCAVS | (SEQ ID | VG | LKS | NSLRAEDT | (SEQ ID | (SEQ ID |
| | GFSIT | NO: 284) | (SEQID | (SEQ ID | AVYYCAR | NO: 7315) | NO: 6006) |
| | (SEQ ID | | NO: 6023) | NO: 6001) | (SEQ ID | | |
| | NO: 285) | | | | NO: 6024) | | |

TABLE 18
Exemplary heavy chain CDRs and FWRs of NKp30-targeting antigen
binding domains (according to the Kabat numbering scheme)

| Ab ID | VHFWR1 | VHCDR1 | VHFWR2 | VHCDR2 | VHFWR3 | VHCDR3 | VHFWR4 |
|---|---|---|---|---|---|---|---|
| 9G1- | QIQLQESGP | GYHWN | WIRQFP | YIYSSGS | RISITRDTS | GNWHY | WGQGT |
| HC | GLVKPSQSL | (SEQ ID | GKKLEW | TSYNPS | KNQFFLQL | FDF | MVTVSS |
| | SLTCSVTGF | NO: 7313) | MG | LKS | NSVTTEDT | (SEQ ID | (SEQ ID |
| | SINTG | | (SEQ ID | (SEQ ID | ATYYCAR | NO: 6002) | NO: 6006) |
| | (SEQ ID | | NO: 6004) | NO: 6001) | (SEQ ID | | |
| | NO: 7317) | | | | NO: 6005) | | |
| 15H6- | QIQLQESGP | GYHWN | WIRQFP | YIYSSGT | RISITRDTS | GNWHY | WGQGTL |
| HC | GLVKPSQSL | (SEQ ID | GKKLEW | TRYNPS | KNQFFLQL | FDY | VAVSS |
| | SLTCSVTGF | NO: 7313) | MG | LKS | NSVTPEDT | (SEQ ID | (SEQ ID |
| | SINTG | | (SEQ ID | (SEQ ID | ATYYCTR | NO: 6009) | NO: 6013) |
| | (SEQ ID | | NO: 6011) | NO: 6008) | (SEQ ID | | |
| | NO: 7317) | | | | NO: 6012) | | |
| 9G1- | QIQLQESGP | GYHWN | WIRQPA | YIYSSGS | RVTMSRDT | GNWHY | WGQGT |
| HC_1 | GLVKPSETL | (SEQ ID | GKGLEW | TSYNPS | SKNQFSLK | FDF | MVTVSS |
| | SLTCTVSGF | NO: 7313) | IG | LKS | LSSVTAAD | (SEQ ID | (SEQ ID |
| | SINTG | | (SEQ ID | (SEQ ID | TAVYYCAR | NO: 6002) | NO: 6017) |
| | (SEQ ID | | NO: 6015) | NO: 6001) | (SEQ ID | | |
| | NO: 7371) | | | | NO: 6016) | | |
| 9G1- | QIQLQESGP | GYHWN | WIRQHP | YIYSSGS | LVTISRDTS | GNWHY | WGQGT |
| HC_2 | GLVKPSQTL | (SEQ ID | GKGLEW | TSYNPS | KNQFSLKL | FDF | MVTVSS |
| | SLTCTVSGF | NO: 7313) | IG | LKS | SSVTAADT | (SEQ ID | (SEQ ID |
| | SINTG | | (SEQ ID | (SEQ ID | AVYYCAR | NO: 6002) | NO: 6021) |
| | (SEQ ID | | NO: 6019) | NO: 6001) | (SEQ ID | | |
| | NO: 7372) | | | | NO: 6020) | | |
| 9G1- | EIQLLESGG | GYHWN | WVRQAP | YIYSSGS | RFTISRDTS | GNWHY | WGQGT |
| HC_3 | GLVQPGGS | (SEQ ID | GKGLEW | TSYNPS | KNTFYLQM | FDF | MVTVSS |
| | LRLSCAVSG | NO: 7313) | VG | LKS | NSLRAEDT | (SEQ ID | (SEQ ID |
| | FSINTG | | (SEQ ID | (SEQ ID | AVYYCAR | NO: 6002) | NO: 6025) |
| | (SEQ ID | | NO: 6023) | NO: 6001) | (SEQ ID | | |
| | NO: 7373) | | | | NO: 6024) | | |
| 9G1- | QIQLVQSGA | GYHWN | WVRQAP | YIYSSGS | RVTITRDTS | GNWHY | WGQGT |
| HC_4 | EVKKPGSSV | (SEQ ID | GQGLEW | TSYNPS | TNTFYMEL | FDF | MVTVSS |
| | KVSCKVSG | NO: 7313) | MG | LKS | SSLRSEDT | (SEQ ID | (SEQ ID |
| | FSINTG | | (SEQ ID | (SEQ ID | AVYYCAR | NO: 6002) | NO: 6029) |
| | (SEQ ID | | NO: 6027) | NO: 6001) | (SEQ ID | | |
| | NO: 7374) | | | | NO: 6028) | | |
| 9G1- | EIQLVESGG | GYHWN | WVRQAP | YIYSSGS | RFTISRDTA | GNWHY | WGQGT |
| HC_5 | GLVQPGGS | (SEQ ID | GKGLEW | TSYNPS | KNSFYLQM | FDF | MVTVSS |
| | LRLSCAVSG | NO: 7313) | VG | LKS | NSLRAEDT | (SEQ ID | (SEQ ID |
| | FSINTG | | (SEQ ID | (SEQ ID | AVYYCAR | NO: 6002) | NO: 6034) |
| | (SEQ ID | | NO:6032) | NO: 6001) | (SEQ ID | | |
| | NO: 7375) | | | | NO: 6033) | | |
| 9G1- | QIQLVQSGA | GYHWN | WVRQAP | YIYSSGS | RVTMTRDT | GNWHY | WGQGT |
| HC_6 | EVKKPGAS | (SEQ ID | GQGLEW | TSYNPS | STNTFYME | FDF | MVTVSS |
| | VKVSCKVS | NO: 7313) | MG | LKS | LSSLRSEDT | (SEQ ID | (SEQ ID |
| | GFSINTG | | (SEQ ID | (SEQ ID | AVYYCAR | NO: 6002) | NO: 6038) |
| | (SEQ ID | | NO: 6036) | NO: 6001) | (SEQ ID | | |
| | NO: 7376) | | | | NO: 6037) | | |
| 15H6- | QIQLQESGP | GYHWN | WIRQHP | YIYSSGT | LVTISRDTS | GNWHY | WGQGTL |
| HC_1 | GLVKPSQTL | (SEQ ID | GKGLEW | TRYNPS | KNQFSLKL | FDY | VTVSS |
| | SLTCTVSGF | NO: 7313) | IG | LKS | SSVTAADT | (SEQ ID | (SEQ ID |
| | SINTG | | (SEQ ID | (SEQ ID | AVYYCAR | NO: 6009) | NO: 6042) |
| | (SEQ ID | | NO: 6040) | NO: 6008) | (SEQ ID | | |
| | NO: 7372) | | | | NO: 6041) | | |
| 15H6- | QIQLQESGP | GYHWN | WIRQPA | YIYSSGT | RVTMSRDT | GNWHY | WGQGTL |
| HC_2 | GLVKPSETL | (SEQ ID | GKGLEW | TRYNPS | SKNQFSLK | FDY | VTVSS |
| | SLTCTVSGF | NO: 7313) | IG | LKS | LSSVTAAD | (SEQ ID | (SEQ ID |
| | SINTG | | (SEQ ID | (SEQ ID | TAVYYCAR | NO: 6009) | NO: 6046) |
| | (SEQ ID | | NO: 6044) | NO: 6008) | (SEQ ID | | |
| | NO: 7371) | | | | NO: 6045) | | |
| 15H6- | EIQLLESGG | GYHWN | WVRQAP | YIYSSGT | RFTISRDTS | GNWHY | WGQGTL |
| HC_3 | GLVQPGGS | (SEQ ID | GKGLEW | TRYNPS | KNTFYLQM | FDY | VTVSS |
| | LRLSCAVSG | NO: 7313) | VG | LKS | NSLRAEDT | (SEQ ID | (SEQ ID |
| | FSINTG | | (SEQ ID | (SEQ ID | AVYYCAR | NO: 6009) | NO: 6050) |
| | (SEQ ID | | NO: 6048) | NO: 6008) | (SEQ ID | | |
| | NO: 7373) | | | | NO: 6049) | | |
| 15H6- | QIQLVESGG | GYHWN | WIRQAP | YIYSSGT | RFTISRDTA | GNWHY | WGQGTL |
| HC_4 | GLVKPGGS | (SEQ ID | GKGLEW | TRYNPS | KNSFYLQM | FDY | VTVSS |
| | LRLSCAVSG | NO: 7313) | VG | LKS | NSLRAEDT | (SEQ ID | (SEQ ID |
| | FSINTG | | (SEQ ID | (SEQ ID | AVYYCAR | NO: 6009) | NO: 6054) |
| | (SEQ ID | | NO: 6052) | NO: 6008) | (SEQ ID | | |
| | NO: 7377) | | | | NO: 6053) | | |
| 15H6- | QIQLVQSGA | GYHWN | WVRQAP | YIYSSGT | RVTMTRDT | GNWHY | WGQGTL |
| HC_5 | EVKKPGAS | (SEQ ID | GQGLEW | TRYNPS | STNTFYME | FDY | VTVSS |
| | VKVSCKVS | NO: 7313) | MG | LKS | LSSLRSEDT | (SEQ ID | (SEQ ID |
| | GFSINTG | | (SEQ ID | (SEQ ID | AVYYCAR | NO: 6009) | NO: 6058) |
| | (SEQ ID | | NO: 6056) | NO: 6008) | (SEQ ID | | |
| | NO: 7376) | | | | NO: 6057) | | |
| 15H6- | EIQLVQSGA | GYHWN | WVQQA | YIYSSGT | RVTITRDTS | GNWHY | WGQGTL |
| HC_6 | EVKKPGAT | (SEQ ID | PGKGLE | TRYNPS | TNTFYMEL | FDY | VTVSS |
| | VKISCKVSG | NO: 7313) | WMG | LKS | SSLRSEDT | (SEQ ID | (SEQ ID |
| | FSINTG | | (SEQ ID | (SEQ ID | AVYYCAR | NO: 6009) | NO: 6062) |
| | (SEQ ID | | NO: 6060) | NO: 6008) | (SEQ ID | | |
| | NO: 7378) | | | | NO: 6061) | | |
| 9D9- | QIQLQESGP | GYHWN | WIRQFP | YIYSSGT | RISITRDTS | GDWHY | WGQGT |
| HC | GLVKPSQSL | (SEQ ID | GKKVE | TKYNPS | KNQFFLQL | FDY | MVAVSS |
| | SLSCSVTGF | NO: 7313) | WMG | LKS | NSVTTEDT | (SEQ ID | (SEQ ID |
| | SINTG | | (SEQ ID | (SEQ ID | ATYYCAR | NO: 7315) | NO: 7316) |
| | (SEQ ID | | NO: 7314) | NO: 7385) | (SEQ ID | | |
| | NO: 7312) | | | | NO: 6005) | | |
| 3A12- | QIQLQESGP | GYHWN | WIRQFP | YIYSSGS | RFSITRDTS | GNWHY | WGQGTL |
| HC | GLVKPSQSL | (SEQ ID | GKKLEW | TRYNPS | KNQFFLQL | FDY | VAVSS |
| | SLTCSVTGF | NO: 7313) | MG | LKS | NSVTTEDT | (SEQ ID | (SEQ ID |
| | SINTG | | (SEQ ID | (SEQ ID | ATYYCTR | NO: 6009) | NO: 6013) |
| | (SEQ ID | | NO: 6004) | NO: 7318) | (SEQ ID | | |
| | NO: 7317) | | | | NO: 7319) | | |
| 12D10- | QIQLQESGP | GYHWN | WIRQFP | YIYSSGT | RISITRDTS | GNWHY | WGQGTL |
| HC | GLVKPSQSL | (SEQ ID | GKKLEW | TRYNPS | KNQFFLQL | FDY | VAVSS |
| | SLTCSVTGF | NO: 7313) | MG | LKS | NSVTPEDT | (SEQ ID | (SEQ ID |
| | SINTG | | (SEQ ID | (SEQ ID | ATYYCTR | NO: 6009) | NO: 6013) |
| | (SEQ ID | | NO: 6004) | NO: 6008) | (SEQ ID | | |
| | NO: 7317) | | | | NO: 6012) | | |
| 15E1- | QIQLQESGP | GYHWN | WIRQFP | YIYSSGS | RFSITRDTS | GDWHY | WGPGT |
| HC | GLVKPSQSL | (SEQ ID | GKKLEW | TSYNPS | KNQFFLQL | FDY | MVTVSS |
| | SLSCSVTGF | NO: 7313) | MG | LKS | NSVTTEDT | (SEQ ID | (SEQ ID |
| | SITTT | | (SEQ ID | (SEQ ID | ATYYCAR | NO: 7315) | NO: 7324) |
| | (SEQ ID | | NO: 6004) | NO: 6001) | (SEQ ID | | |
| | NO: 7322) | | | | NO: 7323) | | |
| 15E1_ | QIQLQESGP | GYHWN | WIRQHP | YIYSSGS | LVTISRDTS | GDWHY | WGQGT |
| Human- | GLVKPSQTL | (SEQ ID | GKGLEW | TSYNPS | KNQFSLKL | FDY | MVTVSS |
| ized | SLTCTVSGF | NO: 7313) | IG | LKS | SSVTAADT | (SEQ ID | (SEQ ID |
| variant | SITTT | | (SEQ ID | (SEQ ID | AVYYCAR | NO: 7315) | NO: 6006) |
| _VH1 | (SEQ ID | | NO: 6019) | NO: 6001) | (SEQ ID | | |
| | NO: 7330) | | | | NO: 6020) | | |
| 15E1_ | QIQLVESGG | GYHWN | WIRQAP | YIYSSGS | RFTISRDTA | GDWHY | WGQGT |
| Human- | GLVKPGGS | (SEQ ID | GKGLEW | TSYNPS | KNSFYLQM | FDY | MVTVSS |
| ized | LRLSCAVSG | NO: 7313) | VG | LKS | NSLRAEDT | (SEQ ID | (SEQ ID |
| variant | FSITTT | | (SEQ ID | (SEQ ID | AVYYCAR | NO: 7315) | NO: 6006) |
| _VH2 | (SEQ ID | | NO: 6052) | NO: 6001) | (SEQ ID | | |
| | NO: 7331) | | | | NO: 6033) | | |
| 15E1_ | EIQLLESGG | GYHWN | WVRQAP | YIYSSGS | RFTISRDTS | GDWHY | WGQGT |
| Human- | GLVQPGGS | (SEQ ID | GKGLEW | TSYNPS | KNTFYLQM | FDY | MVTVSS |
| ized | LRLSCAVSG | NO: 7313) | VG | LKS | NSLRAEDT | (SEQ ID | (SEQ ID |
| variant | FSITTT | | (SEQ ID | (SEQ ID | AVYYCAR | NO: 7315) | NO: 6006) |
| _VH3 | (SEQ ID | | NO: 6023) | NO: 6001) | (SEQ ID | | |
| | NO: 7332) | | | | NO: 6024) | | |
| 15E1_ | EIQLVESGG | GYHWN | WVRQAP | YIYSSGS | RFTISRDTA | GDWHY | WGQGT |
| Human- | GLVQPGGS | (SEQ ID | GKGLEW | TSYNPS | KNSFYLQM | FDY | MVTVSS |
| ized | LRLSCAVSG | NO: 7313) | VG | LKS | NSLRAEDT | (SEQ ID | (SEQ ID |
| variant | FSITTT | | (SEQ ID | (SEQ ID | AVYYCAR | NO: 7315) | NO: 6006) |
| _VH4 | (SEQ ID | | NO: 6023) | NO: 6001) | (SEQ ID | | |
| | NO: 7333) | | | | NO: 6033) | | |
| 15E1_ | QIQLVQSGA | GYHWN | WVRQAP | YIYSSGS | RVTMTRDT | GDWHY | WGQGT |
| Human- | EVKKPGAS | (SEQ ID | GQGLEW | TSYNPS | STNTFYME | FDY | MVTVSS |
| ized | VKVSCKVS | NO: 7313) | MG | LKS | LSSLRSEDT | (SEQ ID | (SEQ ID |
| variant | GFSITTT | | (SEQ ID | (SEQ ID | AVYYCAR | NO: 7315) | NO: 6006) |
| _VH5 | (SEQ ID | | NO: 6027) | NO: 6001) | (SEQ ID | | |
| | NO: 7334) | | | | NO: 6037) | | |

TABLE 8
Exemplary light chain CDRs and FWRs of NKp30-targeting antigen
binding domains

| Ab ID | FWR1 | CDR1 | FWR2 | CDR2 | FWR3 | CDR3 | FWR4 |
|---|---|---|---|---|---|---|---|
| 9G1- | SYTLTQP | SGERLS | WYQQKP | ENDKRP | GIPDQFSGS | QAGYE | FGSGTQL |
| LC | PLLSVAL | DKYVH | GRAPVM | S | NSGNIATLTI | ADYYC | TVL |
| | GHKATIT | (SEQ ID | VIY | (SEQ ID | SKA | (SEQ ID | (SEQ ID |
| | C | NO: 6063) | (SEQ ID | NO: 6064) | (SEQ ID | NO: 6065) | NO: 6069) |
| | (SEQ ID | | NO: 6067) | | NO: 6068) | | |
| | NO: 6066) | | | | | | |
| 15H6- | SYTLTQP | SGENLS | WYQQKP | ENEKRP | GIPDQFSGS | HYWESI | FGSGTHL |
| LC | PSLSVAP | DKYVH | GRAPVM | S | NSGNIATLTI | NSVV | TVL |
| | GQKATII | (SEQ ID | VIY | (SEQ ID | SKAQPGSEA | (SEQ ID | (SEQ ID |
| | C | NO: 6070) | (SEQ ID | NO: 6071) | DYYC | NO: 6072) | NO: 6076) |
| | (SEQ ID | | NO: 6074) | | (SEQ ID | | |
| | NO: 6073) | | | | NO: 6075) | | |
| 9G1- | QSVTTQP | SGERLS | WYQQLP | ENDKRP | GVPDRFSGS | QAGYE | FGGGTQL |
| LC_1 | PSVSGAP | DKYVH | GTAPKM | S | NSGNSASLA | ADYYC | TVL |
| | GQRVTIS | (SEQ ID | LIY | (SEQ ID | ITGLQAEDE | (SEQ ID | (SEQ ID |
| | C | NO: 6063) | (SEQ ID | NO: 6064) | ADYYC | NO: 6065) | NO: 6080) |
| | (SEQ ID | | NO: 6078) | | (SEQ ID | | |
| | NO: 6077) | | | | NO: 6079) | | |
| 9G1- | QSVTTQP | SGERLS | WYQQLP | ENDKRP | GVPDRFSGS | QAGYE | FGGGTQL |
| LC_2 | PSASGTP | DKYVH | GTAPKM | S | NSGNSASLA | ADYYC | TVL |
| | GQRVTIS | (SEQ ID | LIY | (SEQ ID | ISGLQSEDE | (SEQ ID | (SEQ ID |
| | C | NO: 6063) | (SEQ ID | NO: 6064) | ADYYC | NO: 6065) | NO: 6084) |
| | (SEQ ID | | NO: 6082) | | (SEQ ID | | |
| | NO: 6081) | | | | NO: 6083) | | |
| 9G1- | QSVTTQP | SGERLS | WYQQLP | ENDKRP | GVPDRFSGS | QAGYE | FGGGTQL |
| LC_3 | PSASGTP | DKYVH | GTAPKM | S | NSGNSASLA | ADYYC | TVL |
| | GQRVTIS | (SEQ ID | LIY | (SEQ ID | ISGLRSEDE | (SEQ ID | (SEQ ID |
| | C | NO: 6063) | (SEQ ID | NO: 6064) | ADYYC | NO: 6065) | NO: 6088) |
| | (SEQ ID | | NO: 6086) | | (SEQ ID | | |
| | NO: 6085) | | | | NO: 6087) | | |
| 9G1- | SSETTQP | SGERLS | WYQQKP | ENDKRP | GIPERFSGS | QAGYE | FGGGTQL |
| LC_4 | HSVSVAT | DKYVH | GQDPVM | S | NPGNTATLT | ADYYC | TVL |
| | AQMARIT | (SEQ ID | VIY | (SEQ ID | ISRIEAGDE | (SEQ ID | (SEQ ID |
| | C | NO: 6063) | (SEQ ID | NO: 6064) | ADYYC | NO: 6065) | NO: 6092) |
| | (SEQ ID | | NO: 6090) | | (SEQ ID | | |
| | NO: 6089) | | | | NO: 6091) | | |
| 9G1- | DIQMTQS | SGERLS | WYQQKP | ENDKRP | GVPSRFSGS | QAGYE | FGQGTK |
| LC_5 | PSTLSAS | DKYVH | GKAPKM | S | NSGNEATLT | ADYYC | VEIK |
| | VGDRVTI | (SEQ ID | LIY | (SEQ ID | ISSLQPDDF | (SEQ ID | (SEQ ID |
| | TC | NO: 6063) | (SEQ ID | NO: 6064) | ATYYC | NO: 6065) | NO: 6096) |
| | (SEQ ID | | NO: 6094) | | (SEQ ID | | |
| | NO: 6093) | | | | NO: 6095) | | |
| 15H6- | QYVLTQP | SGENLS | WYQQLP | ENEKRP | GVPDRFSGS | HYWESI | FGEGTEL |
| LC_1 | PSASGTP | DKYVH | GTAPKM | S | NSGNSASLA | NSVV | TVL |
| | GQRVTIS | (SEQ ID | LIY | (SEQ ID | ISGLQSEDE | (SEQ ID | (SEQ ID |
| | C | NO: 6070) | (SEQ ID | NO: 6071) | ADYYC | NO: 6072) | NO: 6100) |
| | (SEQ ID | | NO: 6098) | | (SEQ ID | | |
| | NO: 6097) | | | | NO: 6099) | | |
| 15H6- | QYVLTQP | SGENLS | WYQQLP | ENEKRP | GVPDRFSGS | HYWESI | FGEGTEL |
| LC_2 | PSASGTP | DKYVH | GTAPKM | S | NSGNSASLA | NSVV | TVL |
| | GQRVTIS | (SEQ ID | LIY | (SEQ ID | ISGLRSEDE | (SEQ ID | (SEQ ID |
| | C | NO: 6070) | (SEQ ID | NO: 6071) | ADYYC | NO: 6072) | NO: 6104) |
| | (SEQ ID | | NO: 6102) | | (SEQ ID | | |
| | NO: 6101) | | | | NO: 6103) | | |
| 15H6- | SYELTQP | SGENLS | WYQQKP | ENEKRP | GIPERFSGS | HYWESI | FGEGTEL |
| LC_3 | PSVSVSP | DKYVH | GQSPVM | S | NSGNTATLT | NSVV | TVL |
| | GQTASIT | (SEQ ID | VIY | (SEQ ID | ISGTQAMDE | (SEQ ID | (SEQ ID |
| | C | NO: 6070) | (SEQ ID | NO: 6071) | ADYYC | NO: 6072) | NO: 6108) |
| | (SEQ ID | | NO: 6106) | | (SEQ ID | | |
| | NO: 6105) | | | | NO: 6107) | | |
| 15H6- | DYVLTQS | SGENLS | WYLQKP | ENEKRP | GVPDRFSGS | HYWESI | FGQGTK |
| LC_4 | PLSLPVT | DKYVH | GQSPQM | S | NSGNDATL | NSVV | VEIK |
| | PGEPASIS | (SEQ ID | LIY | (SEQ ID | KISRVEAED | (SEQ ID | (SEQ ID |
| | C | NO: 6070) | (SEQ ID | NO: 6071) | VGVYYC | NO: 6072) | NO: 6112) |
| | (SEQ ID | | NO: 6110) | | (SEQ ID | | |
| | NO: 6109) | | | | NO: 6111) | | |
| 15H6- | AYQLTQS | SGENLS | WYQQKP | ENEKRP | GVPSRFSGS | HYWESI | FGQGTK |
| LC_5 | PSSLSAS | DKYVH | GKAPKM | S | NSGNDATL | NSVV | VEIK |
| | VGDRVTI | (SEQ ID | LIY | (SEQ ID | TISSLQPEDF | (SEQ ID | (SEQ ID |
| | TC | NO: 6070) | (SEQ ID | NO: 6071) | ATYYC | NO: 6072) | NO: 6116) |
| | (SEQ ID | | NO: 6114) | | (SEQ ID | | |
| | NO: 6113) | | | | NO: 6115) | | |
| 15H6- | EYVLTQS | SGENLS | WYQQKP | ENEKRP | GIPARFSGS | HYWESI | FGQGTK |
| LC_6 | PATLSVS | DKYVH | GQAPRM | S | NSGNEATLT | NSVV | VEIK |
| | PGERATL | (SEQ ID | LIY | (SEQ ID | ISSLQSEDFA | (SEQ ID | (SEQ ID |
| | SC | NO: 6070) | (SEQ ID | NO: 6071) | VYYC | NO: 6072) | NO: 6120) |
| | (SEQ ID | | NO: 6118) | | (SEQ ID | | |
| | NO: 6117) | | | | NO: 6119) | | |
| BJM04 | DSVTTQS | SGEKLS | WYQQRP | ENDRRP | GVPDRFSGS | QFWDS | FGGGTK |
| 11 VL | PLSLPVT | DKYVH | GQSPRML | S | NSGNDATL | TNSAV | VEIK |
| | LGQPASI | (SEQ ID | IY | (SEQ ID | KISRVEAED | (SEQ ID | (SEQ ID |
| | SC | NO: 7326) | (SEQ ID | NO: 7327) | VGVYFC | NO: 7329) | NO: 286) |
| | (SEQ ID | | NO: 7341) | | (SEQ ID | | |
| | NO: 7340) | | | | NO: 7342) | | |
| 9D9- | SYTLTQP | SGENLS | WYQQKP | ENDKRP | GIPDQFSGS | HCWDS | FGSGTHL |
| LC | PLVSVAL | DKYVH | GRAPVM | S | NSGNIATLTI | TNSAV | TVL |
| | GQKATII | (SEQ ID | VIY | (SEQ ID | SKAQAGYE | (SEQ ID | (SEQ ID |
| | C | NO: 6070) | (SEQ ID | NO: 6064) | ADYYC | NO: 7321) | NO: 6076) |
| | (SEQ ID | | NO: 6067) | | (SEQ ID | | |
| | NO: 7320) | | | | NO: 7292) | | |
| 3A12- | SYTLTQP | SGENLS | WYQQKP | ENDKRP | GIPDQFSGS | HCWDS | FGSGTHL |
| LC | PLVSVAL | DKYVH | GRAPVM | S | NSGNIATLTI | TNSAV | TVL |
| | GQKATII | (SEQ ID | VIY | (SEQ ID | SKAQAGYE | (SEQ ID | (SEQ ID |
| | C | NO: 6070) | (SEQ ID | NO: 6064) | ADYYC | NO: 7321) | NO: 6076) |
| | (SEQ ID | | NO: 6067) | | (SEQ ID | | |
| | NO: 7320) | | | | NO: 7292) | | |
| 12D10- | SYTLTQP | SGENLS | WYQQKP | ENEKRP | GIPDQFSGS | HYWESI | FGSGTHL |
| LC | PSLSVAP | DKYVH | GRAPVM | S | NSGNIATLTI | NSVV | TVL |
| | GQKATII | (SEQ ID | VIY | (SEQ ID | SKAQPGSEA | (SEQ ID | (SEQ ID |
| | C | NO: 6070) | (SEQ ID | NO: 6071) | DYYC | NO: 6072) | NO: 6076) |
| | (SEQ ID | | NO: 6074) | | (SEQ ID | | |
| | NO: 6073) | | | | NO: 6075) | | |
| 15E1- | SFTLTQP | SGEKLS | WYQQKP | ENDRRP | GIPDQFSGS | QFWDS | FGGGTQL |
| LC | PLVSVAV | DKYVH | GRAPVM | S | NSGNIASLTI | TNSAV | TVL |
| | GQVATIT | (SEQ ID | VIY | (SEQ ID | SKAQAGDE | (SEQ ID | (SEQ ID |
| | C | NO: 7326) | (SEQ ID | NO: 7327) | ADYFC | NO: 7329) | NO: 6080) |
| | (SEQ ID | | NO: 6067) | | (SEQ ID | | |
| | NO: 7325) | | | | NO: 7328) | | |
| 15E1_ | SSETTQP | SGEKLS | WYQQKP | ENDRRP | GIPERFSGS | QFWDS | FGGGTQL |
| Human- | PSVSVSP | DKYVH | GQSPVM | S | NSGNTATLT | TNSAV | TVL |
| ized | GQTASIT | (SEQ ID | VIY | (SEQ ID | ISGTQAMDE | (SEQ ID | (SEQ ID |
| variant | C | NO: 7326) | (SEQ ID | NO: 7327) | ADYFC | NO: 7329) | NO: 6080) |
| _VL1 | (SEQ ID | | NO: 6106) | | (SEQ ID | | |
| | NO: 7335) | | | | NO: 7336) | | |
| 15E1_ | SSETTQP | SGEKLS | WYQQKP | ENDRRP | GIPERFSGS | QFWDS | FGGGTQL |
| Human- | HSVSVAT | DKYVH | GQDPVM | S | NPGNTATLT | TNSAV | TVL |
| ized | AQMARIT | (SEQ ID | VIY | (SEQ ID | ISRIEAGDE | (SEQ ID | (SEQ ID |
| variant | C | NO: 7326) | (SEQ ID | NO: 7327) | ADYFC | NO: 7329) | NO: 6080) |
| _VL2 | (SEQ ID | | NO: 6090) | | (SEQ ID | | |
| | NO: 6089) | | | | NO: 7337) | | |
| 15E1_ | QSVTTQP | SGEKLS | WYQQLP | ENDRRP | GVPDRFSGS | QFWDS | FGGGTQL |
| Human- | PSASGTP | DKYVH | GTAPKM | S | NSGNSASLA | TNSAV | TVL |
| ized | GQRVTIS | (SEQ ID | LIY | (SEQ ID | ISGLRSEDE | (SEQ ID | (SEQ ID |
| variant | C | NO: 7326) | (SEQ ID | NO: 7327) | ADYFC | NO: 7329) | NO: 6080) |
| _VL3 | (SEQ ID | | NO: 6078) | | (SEQ ID | | |
| | NO: 6081) | | | | NO: 7338) | | |
| 15E1_ | QSVTTQP | SGEKLS | WYQQLP | ENDRRP | GVPDRFSGS | QFWDS | FGGGTQL |
| Human- | PSVSGAP | DKYVH | GTAPKM | S | NSGNSASLA | TNSAV | TVL |
| ized | GQRVTIS | (SEQ ID | LIY | (SEQ ID | ITGLQAEDE | (SEQ ID | (SEQ ID |
| variant | C | NO: 7326) | (SEQ ID | NO: 7327) | ADYFC | NO: 7329) | NO: 6080) |
| _VL4 | (SEQ ID | | NO: 6078) | | (SEQ ID | | |
| | NO: 6077) | | | | NO: 7339) | | |
| 15E1_ | DSVTTQS | SGEKLS | WYQQRP | ENDRRP | GVPDRFSGS | QFWDS | FGGGTK |
| Human- | PLSLPVT | DKYVH | GQSPRML | S | NSGNDATL | TNSAV | VEIK |
| ized | LGQPASI | (SEQ ID | IY | (SEQ ID | KISRVEAED | (SEQ ID | (SEQ ID |
| variant | SC | NO: 7326) | (SEQ ID | NO: 7327) | VGVYFC | NO: 7329) | NO: 233) |
| _VL5 | (SEQ ID | | NO: 7341) | | (SEQ ID | | |
| | NO: 7340) | | | | NO: 7342) | | |

TABLE 8A
Exemplary heavy chain CDRs and FWRs of NKp30-targeting antigen
binding domains

| Ab ID | VHFWR1 | VHCDR1 | VHFWR2 | VHCDR2 | VHFWR3 | VHCDR3 | VHFWR4 |
|---|---|---|---|---|---|---|---|
| BKM | EIQLLES | ITTTGYH | WVRQAP | YIYSSGS | RFTISRDTS | GDWHY | WGQGT |
| 0138 | GGGLVQ | WN | GKGLEW | TSYNPSL | KNTFYLQ | FDY | MVTVSS |
| | PGGSLRL | (SEQ ID | VG | KS | MNSLRAED | (SEQ ID | (SEQ ID |
| | SCAVSGF | NO: 297) | (SEQ ID | (SEQ ID | TAVYYCA | NO: 7315) | NO: 6006) |
| | S | | NO: 6023) | NO: 6001) | R | | |
| | (SEQ ID | | | | (SEQ ID | | |
| | NO: 295) | | | | NO: 6024) | | |
| BKM | EIQLLES | ITTTGYH | WVRQAP | YIYSSGS | RFTISRDTS | GDWHY | WGQGT |
| 0139 | GGGLVQ | WN | GKGLEW | TSYNPSL | KNTFYLQ | FDY | MVTVSS |
| | PGGSLRL | (SEQ ID | VG | KS | MNSLRAED | (SEQ ID | (SEQ ID |
| | SCAVSGF | NO: 297) | (SEQ ID | (SEQ ID | TAVYYCA | NO: 7315) | NO: 6006) |
| | S | | NO: 6023) | NO: 6001) | R | | |
| | (SEQ ID | | | | (SEQ ID | | |
| | NO: 295) | | | | NO: 6024) | | |
| BKM | EIQLLES | ITTTGYH | WVRQAP | YIYSSGS | RFTISRDTS | GDWHY | WGQGT |
| 0140 | GGGLVQ | WN | GKGLEW | TSYNPSL | KNTFYLQ | FDY | MVTVSS |
| | PGGSLRL | (SEQ ID | VG | KS | MNSLRAED | (SEQ ID | (SEQ ID |
| | SCAVSGF | NO: 297) | (SEQ ID | (SEQ ID | TAVYYCA | NO: 7315) | NO: 6006) |
| | S | | NO: 6023) | NO: 6001) | R | | |
| | (SEQ ID | | | | (SEQ ID | | |
| | NO: 295) | | | | NO: 6024) | | |
| BKM | EIQLLES | ITTTGYH | WVRQAP | YIYSSGS | RFTISRDTS | GDWHY | WGQGT |
| 0141 | GGGLVQ | WN | GKGLEW | TSYNPSL | KNTFYLQ | FDY | MVTVSS |
| | PGGSLRL | (SEQ ID | VG | KS | MNSLRAED | (SEQ ID | (SEQ ID |
| | SCAVSGF | NO: 297) | (SEQ ID | (SEQ ID | TAVYYCA | NO: 7315) | NO: 6006) |
| | S | | NO: 6023) | NO: 6001) | R | | |
| | (SEQ ID | | | | (SEQ ID | | |
| | NO: 295) | | | | NO: 6024) | | |
| BKM | EIQLLES | ITTTGYH | WVRQAP | YIYSSGS | RFTISRDTS | GDWHY | WGQGT |
| 0142 | GGGLVQ | WN | GKGLEW | TSYAPSL | KNTFYLQ | FDY | MVTVSS |
| | PGGSLRL | (SEQ ID | VG | KS | MNSLRAED | (SEQ ID | (SEQ ID |
| | SCAVSGF | NO: 297) | (SEQ ID | (SEQ ID | TAVYYCA | NO: 7315) | NO: 6006) |
| | S | | NO: 6023) | NO: 306) | R | | |
| | (SEQ ID | | | | (SEQ ID | | |
| | NO: 295) | | | | NO: 6024) | | |
| BKM | EIQLLES | ITTTGYH | WVRQAP | YIYSSGS | RFTISRDTS | GDWHY | WGQGT |
| 0143 | GGGLVQ | WN | GKGLEW | TSYAPSL | KNTFYLQ | FDY | MVTVSS |
| | PGGSLRL | (SEQ ID | VG | KS | MNSLRAED | (SEQ ID | (SEQ ID |
| | SCAVSGF | NO: 297) | (SEQ ID | (SEQ ID | TAVYYCA | NO: 7315) | NO: 6006) |
| | S | | NO: 6023) | NO: 306) | R | | |
| | (SEQ ID | | | | (SEQ ID | | |
| | NO: 295) | | | | NO: 6024) | | |
| BKM | EIQLLES | ITTTGYH | WVRQAP | YIYSSGS | RFTISRDTS | GDWHY | WGQGT |
| 0144 | GGGLVQ | WN | GKGLEW | TSYAPSL | KNTFYLQ | FDY | MVTVSS |
| | PGGSLRL | (SEQ ID | VG | KS | MNSLRAED | (SEQ ID | (SEQ ID |
| | SCAVSGF | NO: 297) | (SEQ ID | (SEQ ID | TAVYYCA | NO: 7315) | NO: 6006) |
| | S | | NO: 6023) | NO: 306) | R | | |
| | (SEQ ID | | | | (SEQ ID | | |
| | NO: 295) | | | | NO: 6024) | | |
| BKM | EIQLLES | ITTTGYH | WVRQAP | YIYSSGS | RFTISRDTS | GDWHY | WGQGT |
| 0145 | GGGLVQ | WN | GKGLEW | TSYAPSL | KNTFYLQ | FDY | MVTVSS |
| | PGGSLRL | (SEQ ID | VG | KS | MNSLRAED | (SEQ ID | (SEQ ID |
| | SCAVSGF | NO: 297) | (SEQ ID | (SEQ ID | TAVYYCA | NO: 7315) | NO: 6006) |
| | S | | NO: 6023) | NO: 306) | R | | |
| | (SEQ ID | | | | (SEQ ID | | |
| | NO: 295) | | | | NO: 6024) | | |

TABLE 8B
Exemplary light chain CDRs and FWRs of NKp30-
targeting antigen binding domains

| Ab | | VLCD | VLFW | VLCD | | VLCD | VLFW |
|---|---|---|---|---|---|---|---|
| ID | VLFWR1 | R1 | R2 | R2 | VLFWR3 | R3 | R4 |
| BKM | DSVTTQ | SGEKLS | WYQQRP | ENDR | GVPDRFSGS | QFWD | FGGGT |
| 0138 | SPLSLP | DKYVH | GQSPRM | RPS | NSGNDATL | ST | KVEIK |
| | VTLGQP | (SEQ | LIY | (SEQ | KISRVEAED | ASAV | (SEQ |
| | ASISC | ID | (SEQ | ID | VGVYFC | (SEQ | ID |
| | (SEQ | NO: | ID | NO: | (SEQ ID | ID | NO: |
| | ID | 7326) | NO: | 7327) | NO: | NO: | 286) |
| | NO: | | 7341) | | 7342) | 304) | |
| | 7340) | | | | | | |
| BKM | DSVTTQ | SGEKLS | WYQQRP | ENDR | GVPDRFSGS | QFWA | FGGGT |
| 0139 | SPLSLP | DKYVH | GQSPRM | RPS | NSGNDATL | ST | KVEIK |
| | VTLGQP | (SEQ | LIY | (SEQ | KISRVEAED | NSAV | (SEQ |
| | ASISC | ID | (SEQ | ID | VGVYFC | (SEQ | ID |
| | (SEQ | NO: | ID | NO: | (SEQ ID | ID | NO: |
| | ID | 7326) | NO: | 7327) | NO: | NO: | 286) |
| | NO: | | 7341) | | 7342) | 305) | |
| | 7340) | | | | | | |
| BKM | SSETTQ | SGEKLS | WYQQKP | ENDR | GIPERFSGS | QFWA | FGGGT |
| 0140 | PPSVSV | DKYVH | GQSPVM | RPS | NSGNTATLT | ST | QLTVL |
| | SPGQTA | (SEQ | VIY | (SEQ | ISGTQAMDE | NSAV | (SEQ |
| | SITC | ID | (SEQ | ID | ADYFC | (SEQ | ID |
| | (SEQ | NO: | ID | NO: | (SEQ ID | ID | NO: |
| | ID | 7326) | NO: | 7327) | NO: | NO: | 6080) |
| | NO: | | 6106) | | 7336) | 305) | |
| | 7335) | | | | | | |
| BKM | SSETTQ | SGEKLS | WYQQKP | ENDR | GIPERFSGS | QFWD | FGGGT |
| 0141 | PPSVSV | DKYVH | GQSPVM | RPS | NSGNTATLT | ST | QLTVL |
| | SPGQTA | (SEQ | VIY | (SEQ | ISGTQAMDE | ASAV | (SEQ |
| | SITC | ID | (SEQ | ID | ADYFC | (SEQ | ID |
| | (SEQ | NO: | ID | NO: | (SEQ ID | ID | NO: |
| | ID | 7326) | NO: | 7327) | NO: | NO: | 6080) |
| | NO: | | 6106) | | 7336) | 304) | |
| | 7335) | | | | | | |
| BKM | DSVTTQ | SGEKLS | WYQQRP | ENDR | GVPDRFSGS | QFWD | FGGGT |
| 0142 | SPLSLP | DKYVH | GQSPRM | RPS | NSGNDATL | ST | KVEIK |
| | VTLGQP | (SEQ | LIY | (SEQ | KISRVEAED | NSAV | (SEQ |
| | ASISC | ID | (SEQ | ID | VGVYFC | (SEQ | ID |
| | (SEQ | NO: | ID | NO: | (SEQ ID | ID | NO: |
| | ID | 7326) | NO: | 7327) | NO: | NO: | 286) |
| | NO: | | 7341) | | 7342) | 7329) | |
| | 7340) | | | | | | |
| BKM | SSETTQ | SGEKLS | WYQQKP | ENDR | GIPERFSGS | QFWD | FGGGT |
| 0143 | PPSVSV | DKYVH | GQSPVM | RPS | NSGNTATLT | ST | QLTVL |
| | SPGQTA | (SEQ | VIY | (SEQ | ISGTQAMDE | NSAV | (SEQ |
| | SITC | ID | (SEQ | ID | ADYFC | (SEQ | ID |
| | (SEQ | NO: | ID | NO: | (SEQ ID | ID | NO: |
| | ID | 7326) | NO: | 7327) | NO: | NO: | 6080) |
| | NO: | | 6106) | | 7336) | 7329) | |
| | 7335) | | | | | | |
| BKM | DSVTTQ | SGEKLS | WYQQRP | ENDR | GVPDRFSGS | QFWA | FGGGT |
| 0144 | SPLSLP | DKYVH | GQSPRM | RPS | NSGNDATL | ST | KVEIK |
| | VTLGQP | (SEQ | LIY | (SEQ | KISRVEAED | ASAV | (SEQ |
| | ASISC | ID | (SEQ | ID | VGVYFC | (SEQ | ID |
| | (SEQ | NO: | ID | NO: | (SEQ ID | ID | NO: |
| | ID | 7326) | NO: | 7327) | NO: | NO: | 286) |
| | NO: | | 7341) | | 7342) | 307) | |
| | 7340) | | | | | | |
| BKM | SSETTQ | SGEKLS | WYQQKP | ENDR | GIPERFSGS | QFWA | FGGGT |
| 0145 | PPSVSV | DKYVH | GQSPVM | RPS | NSGNTATLT | ST | QLTVL |
| | SPGQTA | (SEQ | VIY | (SEQ | ISGTQAMDE | ASAV | (SEQ |
| | SITC | ID | (SEQ | ID | ADYFC | (SEQ | ID |
| | (SEQ | NO: | ID | NO: | (SEQ ID | ID | NO: |
| | ID | 7326) | NO: | 7327) | NO: | NO: | 6080) |
| | NO: | | 6106) | | 7336) | 307) | |
| | 7335) | | | | | | |

TABLE 9
Exemplary variable regions of NKp30-targeting antigen binding domains

| SEQ ID NO | Ab ID | Description | Sequence |
|---|---|---|---|
| SEQ ID | 9G1-HC | 9G1 heavy chain | QIQLQESGPGLVKPSQSLSLTCSVTGFSINTGGYHW |
| NO: 6121 | | variable region | NWIRQFPGKKLEWMGYIYSSGSTSYNPSLKSRISIT |
| | | | RDTSKNQFFLQLNSVTTEDTATYYCARGNWHYFD |
| | | | FWGQGTMVTVSS |
| SEQ ID | 15H6-HC | 15H6 heavy | QIQLQESGPGLVKPSQSLSLTCSVTGFSINTGGYHW |
| NO: 6122 | | chain variable | NWIRQFPGKKLEWMGYIYSSGTTRYNPSLKSRISIT |
| | | region | RDTSKNQFFLQLNSVTPEDTATYYCTRGNWHYFD |
| | | | YWGQGTLVAVSS |
| SEQ ID | 9G1-HC_1 | 9G1 heavy chain | QIQLQESGPGLVKPSETLSLTCTVSGFSINTGGYHW |
| NO: 6123 | | variable region | NWIRQPAGKGLEWIGYIYSSGSTSYNPSLKSRVTM |
| | | humanized | SRDTSKNQFSLKLSSVTAADTAVYYCARGNWHYF |
| | | variant 1 | DFWGQGTMVTVSS |
| SEQ ID | 9G1-HC_2 | 9G1 heavy chain | QIQLQESGPGLVKPSQTLSLTCTVSGFSINTGGYHW |
| NO: 6124 | | variable region | NWIRQHPGKGLEWIGYIYSSGSTSYNPSLKSLVTIS |
| | | humanized | RDTSKNQFSLKLSSVTAADTAVYYCARGNWHYFD |
| | | variant 2 | FWGQGTMVTVSS |
| SEQ ID | 9G1-HC_3 | 9G1 heavy chain | EIQLLESGGGLVQPGGSLRLSCAVSGFSINTGGYH |
| NO: 6125 | | variable region | WNWVRQAPGKGLEWVGYIYSSGSTSYNPSLKSRF |
| | | humanized | TISRDTSKNTFYLQMNSLRAEDTAVYYCARGNWH |
| | | variant 3 | YFDFWGQGTMVTVSS |
| SEQ ID | 9G1-HC_4 | 9G1 heavy chain | QIQLVQSGAEVKKPGSSVKVSCKVSGFSINTGGYH |
| NO: 6126 | | variable region | WNWVRQAPGQGLEWMGYIYSSGSTSYNPSLKSRV |
| | | humanized | TITRDTSTNTFYMELSSLRSEDTAVYYCARGNWHY |
| | | variant 4 | FDFWGQGTMVTVSS |
| SEQ ID | 9G1-HC_5 | 9G1 heavy chain | EIQLVESGGGLVQPGGSLRLSCAVSGFSINTGGYH |
| NO: 6127 | | variable region | WNWVRQAPGKGLEWVGYIYSSGSTSYNPSLKSRF |
| | | humanized | TISRDTAKNSFYLQMNSLRAEDTAVYYCARGNWH |
| | | variant 5 | YFDFWGQGTMVTVSS |
| SEQ ID | 9G1-HC_6 | 9G1 heavy chain | QIQLVQSGAEVKKPGASVKVSCKVSGFSINTGGYH |
| NO: 6128 | | variable region | WNWVRQAPGQGLEWMGYIYSSGSTSYNPSLKSRV |
| | | humanized | TMTRDTSTNTFYMELSSLRSEDTAVYYCARGNWH |
| | | variant 6 | YFDFWGQGTMVTVSS |
| SEQ ID | 15H6- | 15H6 heavy | QIQLQESGPGLVKPSQTLSLTCTVSGFSINTGGYHW |
| NO: 6129 | HC_1 | chain variable | NWIRQHPGKGLEWIGYIYSSGTTRYNPSLKSLVTIS |
| | | region | RDTSKNQFSLKLSSVTAADTAVYYCARGNWHYFD |
| | | humanized | YWGQGTLVTVSS |
| | | variant 1 | |
| SEQ ID | 15H6- | 15H6 heavy | QIQLQESGPGLVKPSETLSLTCTVSGFSINTGGYHW |
| NO: 6130 | HC_2 | chain variable | NWIRQPAGKGLEWIGYIYSSGTTRYNPSLKSRVTM |
| | | region | SRDTSKNQFSLKLSSVTAADTAVYYCARGNWHYF |
| | | humanized | DYWGQGTLVTVSS |
| | | variant 2 | |
| SEQ ID | 15H6- | 15H6 heavy | EIQLLESGGGLVQPGGSLRLSCAVSGFSINTGGYH |
| NO: 6131 | HC_3 | chain variable | WNWVRQAPGKGLEWVGYIYSSGTTRYNPSLKSRF |
| | | region | TISRDTSKNTFYLQMNSLRAEDTAVYYCARGNWH |
| | | humanized | YFDYWGQGTLVTVSS |
| | | variant 3 | |
| SEQ ID | 15H6- | 15H6 heavy | QIQLVESGGGLVKPGGSLRLSCAVSGFSINTGGYH |
| NO: 6132 | HC_4 | chain variable | WNWIRQAPGKGLEWVGYIYSSGTTRYNPSLKSRFT |
| | | region | ISRDTAKNSFYLQMNSLRAEDTAVYYCARGNWHY |
| | | humanized | FDYWGQGTLVTVSS |
| | | variant 4 | |
| SEQ ID | 15H6- | 15H6 heavy | QIQLVQSGAEVKKPGASVKVSCKVSGFSINTGGYH |
| NO: 6133 | HC_5 | chain variable | WNWVRQAPGQGLEWMGYIYSSGTTRYNPSLKSR |
| | | region | VTMTRDTSTNTFYMELSSLRSEDTAVYYCARGNW |
| | | humanized | HYFDYWGQGTLVTVSS |
| | | variant 5 | |
| SEQ ID | 15H6- | 15H6 heavy | EIQLVQSGAEVKKPGATVKISCKVSGFSINTGGYH |
| NO: 6134 | HC_6 | chain variable | WNWVQQAPGKGLEWMGYIYSSGTTRYNPSLKSR |
| | | region | VTITRDTSTNTFYMELSSLRSEDTAVYYCARGNWH |
| | | humanized | YFDYWGQGTLVTVSS |
| | | variant 6 | |
| SEQ ID | 9G1-LC | 9G1 light chain | SYTLTQPPLLSVALGHKATITCSGERLSDKYVHWY |
| NO: 6135 | | variable region | QQKPGRAPVMVIYENDKRPSGIPDQFSGSNSGNIAT |
| | | | LTISKAQAGYEADYYCFGSGTQLTVL |
| SEQ ID | 15H6-LC | 15H6 light chain | SYTLTQPPSLSVAPGQKATIICSGENLSDKYVHWY |
| NO: 6136 | | variable region | QQKPGRAPVMVIYENEKRPSGIPDQFSGSNSGNIAT |
| | | | LTISKAQPGSEADYYCHYWESINSVVFGSGTHLTV |
| | | | L |
| SEQ ID | 9G1-LC_1 | 9G1 light chain | QSVTTQPPSVSGAPGQRVTISCSGERLSDKYVHWY |
| NO: 6137 | | variable region | QQLPGTAPKMLIYENDKRPSGVPDRFSGSNSGNSA |
| | | humanized | SLAITGLQAEDEADYYCQSWDSTNSAVFGGGTQL |
| | | variant 1 | TVL |
| SEQ ID | 9G1-LC_2 | 9G1 light chain | QSVTTQPPSASGTPGQRVTISCSGERLSDKYVHWY |
| NO: 6138 | | variable region | QQLPGTAPKMLIYENDKRPSGVPDRFSGSNSGNSA |
| | | humanized | SLAISGLQSEDEADYYCQSWDSTNSAVFGGGTQLT |
| | | variant 2 | VL |
| SEQ ID | 9G1-LC_3 | 9G1 light chain | QSVTTQPPSASGTPGQRVTISCSGERLSDKYVHWY |
| NO: 6139 | | variable region | QQLPGTAPKMLIYENDKRPSGVPDRFSGSNSGNSA |
| | | humanized | SLAISGLRSEDEADYYCQSWDSTNSAVFGGGTQLT |
| | | variant 3 | VL |
| SEQ ID | 9G1-LC_4 | 9G1 light chain | SSETTQPHSVSVATAQMARITCSGERLSDKYVHWY |
| NO: 6140 | | variable region | QQKPGQDPVMVIYENDKRPSGIPERFSGSNPGNTA |
| | | humanized | TLTISRIEAGDEADYYCQSWDSTNSAVFGGGTQLT |
| | | variant 4 | VL |
| SEQ ID | 9G1-LC_5 | 9G1 light chain | DIQMTQSPSTLSASVGDRVTITCSGERLSDKYVHW |
| NO: 6141 | | variable region | YQQKPGKAPKMLIYENDKRPSGVPSRFSGSNSGNE |
| | | humanized | ATLTISSLQPDDFATYYCQSWDSTNSAVFGQGTKV |
| | | variant 5 | EIK |
| SEQ ID | 15H6- | 15H6 light chain | QYVLTQPPSASGTPGQRVTISCSGENLSDKYVHWY |
| NO: 6142 | LC_1 | variable region | QQLPGTAPKMLIYENEKRPSGVPDRFSGSNSGNSA |
| | | humanized | SLAISGLQSEDEADYYCHYWESINSVVFGEGTELT |
| | | variant 1 | VL |
| SEQ ID | 15H6- | 15H6 light chain | QYVLTQPPSASGTPGQRVTISCSGENLSDKYVHWY |
| NO: 6143 | LC_2 | variable region | QQLPGTAPKMLIYENEKRPSGVPDRFSGSNSGNSA |
| | | humanized | SLAISGLRSEDEADYYCHYWESINSVVFGEGTELT |
| | | variant 2 | VL |
| SEQ ID | 15H6- | 15H6 light chain | SYELTQPPSVSVSPGQTASITCSGENLSDKYVHWY |
| NO: 6144 | LC_3 | variable region | QQKPGQSPVMVIYENEKRPSGIPERFSGSNSGNTAT |
| | | humanized | LTISGTQAMDEADYYCHYWESINSVVFGEGTELTV |
| | | variant 3 | L |
| SEQ ID | 15H6- | 15H6 light chain | DYVLTQSPLSLPVTPGEPASISCSGENLSDKYVHW |
| NO: 6145 | LC_4 | variable region | YLQKPGQSPQMLIYENEKRPSGVPDRFSGSNSGND |
| | | humanized | ATLKISRVEAEDVGVYYCHYWESINSVVFGQGTK |
| | | variant 4 | VEIK |
| SEQ ID | 15H6- | 15H6 light chain | AYQLTQSPSSLSASVGDRVTITCSGENLSDKYVHW |
| NO: 6146 | LC_5 | variable region | YQQKPGKAPKMLIYENEKRPSGVPSRFSGSNSGND |
| | | humanized | ATLTISSLQPEDFATYYCHYWESINSVVFGQGTKV |
| | | variant 5 | EIK |
| SEQ ID | 15H6- | 15H6 light chain | EYVLTQSPATLSVSPGERATLSCSGENLSDKYVHW |
| NO: 6147 | LC_6 | variable region | YQQKPGQAPRMLIYENEKRPSGIPARFSGSNSGNE |
| | | humanized | ATLTISSLQSEDFAVYYCHYWESINSVVFGQGTKV |
| | | variant 6 | EIK |
| SEQ ID | | BJM0411 VH | EIQLLESGGGLVQPGGSLRLSCAVSGFSITTTGYHW |
| NO: 7302 | | | NWVRQAPGKGLEWVGYIYSSGSTSYNPSLKSRFTI |
| | | | SRDTSKNTFYLQMNSLRAEDTAVYYCARGDWHY |
| | | | FDYWGQGTMVTVSS |
| SEQ ID | | BJM0411 VL | DSVTTQSPLSLPVTLGQPASISCSGEKLSDKYVHW |
| NO: 7309 | | | YQQRPGQSPRMLIYENDRRPSGVPDRFSGSNSGND |
| | | | ATLKISRVEAEDVGVYFCQFWDSTNSAVFGGGTK |
| | | | VEIK |
| SEQ ID | 9D9-HC | 9D9 heavy chain | QIQLQESGPGLVKPSQSLSLSCSVTGFSINTGGYHW |
| NO: 7295 | | variable region | NWIRQFPGKKVEWMGYIYSSGTTKYNPSLKSRISIT |
| | | | RDTSKNQFFLQLNSVTTEDTATYYCARGDWHYFD |
| | | | YWGQGTMVAVSS |
| SEQ ID | 9D9-LC | 9D9 light chain | SYTLTQPPLVSVALGQKATIICSGENLSDKYVHWY |
| NO: 7296 | | variable region | QQKPGRAPVMVIYENDKRPSGIPDQFSGSNSGNIAT |
| | | | LTISKAQAGYEADYYCHCWDSTNSAVFGSGTHLT |
| | | | VL |
| SEQ ID | 3A12-HC | 3A12 heavy | QIQLQESGPGLVKPSQSLSLTCSVTGFSINTGGYHW |
| NO: 7297 | | chain variable | NWIRQFPGKKLEWMGYIYSSGSTRYNPSLKSRFSIT |
| | | region | RDTSKNQFFLQLNSVTTEDTATYYCTRGNWHYFD |
| | | | YWGQGTLVAVSS |
| SEQ ID | 3A12-LC | 3A12 light chain | SYTLTQPPLVSVALGQKATIICSGENLSDKYVHWY |
| NO: 7296 | | variable region | QQKPGRAPVMVIYENDKRPSGIPDQFSGSNSGNIAT |
| | | | LTISKAQAGYEADYYCHCWDSTNSAVFGSGTHLT |
| | | | VL |
| SEQ ID | 12D10-HC | 12D10 heavy | QIQLQESGPGLVKPSQSLSLTCSVTGFSINTGGYHW |
| NO: 6122 | | chain variable | NWIRQFPGKKLEWMGYIYSSGTTRYNPSLKSRISIT |
| | | region | RDTSKNQFFLQLNSVTPEDTATYYCTRGNWHYFD |
| | | | YWGQGTLVAVSS |
| SEQ ID | 12D10-LC | 12D10 light | SYTLTQPPSLSVAPGQKATIICSGENLSDKYVHWY |
| NO: 6136 | | chain variable | QQKPGRAPVMVIYENEKRPSGIPDQFSGSNSGNIAT |
| | | region | LTISKAQPGSEADYYCHYWESINSVVFGSGTHLTV |
| | | | L |
| SEQ ID | 15E1-HC | 15E1 heavy | QIQLQESGPGLVKPSQSLSLSCSVTGFSITTTGYHW |
| NO: 7298 | | chain variable | NWIRQFPGKKLEWMGYIYSSGSTSYNPSLKSRFSIT |
| | | region | RDTSKNQFFLQLNSVTTEDTATYYCARGDWHYFD |
| | | | YWGPGTMVTVSS |
| SEQ ID | 15E1-LC | 15E1 light chain | SFTLTQPPLVSVAVGQVATITCSGEKLSDKYVHWY |
| NO: 7299 | | variable region | QQKPGRAPVMVIYENDRRPSGIPDQFSGSNSGNIAS |
| | | | LTISKAQAGDEADYFCQFWDSTNSAVFGGGTQLT |
| | | | VL |
| SEQ ID | 15E1_ | 15E1 heavy | QIQLQESGPGLVKPSQTLSLTCTVSGFSITTTGYHW |
| NO: 7300 | Humanized | chain variable | NWIRQHPGKGLEWIGYIYSSGSTSYNPSLKSLVTIS |
| | variant_ | region | RDTSKNQFSLKLSSVTAADTAVYYCARGDWHYFD |
| | VH1 | humanized | YWGQGTMVTVSS |
| | | variant 1 | |
| SEQ ID | 15E1_ | 15E1 heavy | QIQLVESGGGLVKPGGSLRLSCAVSGFSITTTGYH |
| NO: 7301 | Humanized | chain variable | WNWIRQAPGKGLEWVGYIYSSGSTSYNPSLKSRFT |
| | variant_ | region | ISRDTAKNSFYLQMNSLRAEDTAVYYCARGDWHY |
| | VH2 | humanized | FDYWGQGTMVTVSS |
| | | variant 2 | |
| SEQ ID | 15E1_ | 15E1 heavy | EIQLLESGGGLVQPGGSLRLSCAVSGFSITTTGYHW |
| NO: 7302 | Humanized | chain variable | NWVRQAPGKGLEWVGYIYSSGSTSYNPSLKSRFTI |
| | variant_ | region | SRDTSKNTFYLQMNSLRAEDTAVYYCARGDWHY |
| | VH3 | humanized | FDYWGQGTMVTVSS |
| | (BJM0407 | variant 3 | |
| | VH and | | |
| | BJM0411 | | |
| | VH) | | |
| SEQ ID | 15E1_ | 15E1 heavy | EIQLVESGGGLVQPGGSLRLSCAVSGFSITTTGYHW |
| NO: 7303 | Humanized | chain variable | NWVRQAPGKGLEWVGYIYSSGSTSYNPSLKSRFTI |
| | variant_ | region | SRDTAKNSFYLQMNSLRAEDTAVYYCARGDWHY |
| | VH4 | humanized | FDYWGQGTMVTVSS |
| | | variant 4 | |
| SEQ ID | 15E1_ | 15E1 heavy | QIQLVQSGAEVKKPGASVKVSCKVSGFSITTTGYH |
| NO: 7304 | Humanized | chain variable | WNWVRQAPGQGLEWMGYIYSSGSTSYNPSLKSRV |
| | variant_ | region | TMTRDTSTNTFYMELSSLRSEDTAVYYCARGDWH |
| | VH5 | humanized | YFDYWGQGTMVTVSS |
| | | variant 5 | |
| SEQ ID | 15E1_ | 15E1 light chain | SSETTQPPSVSVSPGQTASITCSGEKLSDKYVHWYQ |
| NO: 7305 | Humanized | variable region | QKPGQSPVMVIYENDRRPSGIPERFSGSNSGNTATL |
| | variant_ | humanized | TISGTQAMDEADYFCQFWDSTNSAVFGGGTQLTV |
| | VL1 | variant 1 | L |
| | (BJM0407 | | |
| | VL) | | |
| SEQ ID | 15E1_ | 15E1 light chain | SSETTQPHSVSVATAQMARITCSGEKLSDKYVHW |
| NO: 7306 | Humanized | variable region | YQQKPGQDPVMVIYENDRRPSGIPERFSGSNPGNT |
| | variant_ | humanized | ATLTISRIEAGDEADYFCQFWDSTNSAVFGGGTQL |
| | VL2 | variant 2 | TVL |
| SEQ ID | 15E1_ | 15E1 light chain | QSVTTQPPSASGTPGQRVTISCSGEKLSDKYVHWY |
| NO: 7307 | Humanized | variable region | QQLPGTAPKMLIYENDRRPSGVPDRFSGSNSGNSA |
| | variant_ | humanized | SLAISGLRSEDEADYFCQFWDSTNSAVFGGGTQLT |
| | VL3 | variant 3 | VL |
| SEQ ID | 15E1_ | 15E1 light chain | QSVTTQPPSVSGAPGQRVTISCSGEKLSDKYVHWY |
| NO: 7308 | Humanized | variable region | QQLPGTAPKMLIYENDRRPSGVPDRFSGSNSGNSA |
| | variant_ | humanized | SLAITGLQAEDEADYFCQFWDSTNSAVFGGGTQLT |
| | VL4 | variant 4 | VL |
| SEQ ID | 15E1_ | 15E1 light chain | DSVTTQSPLSLPVTLGQPASISCSGEKLSDKYVHW |
| NO: 7309 | Humanized | variable region | YQQRPGQSPRMLIYENDRRPSGVPDRFSGSNSGND |
| | variant_ | humanized | ATLKISRVEAEDVGVYFCQFWDSTNSAVFGGGTK |
| | VL5 | variant 5 | VEIK |
| | (BJM0411 | | |
| | VL) | | |
| SEQ ID | BKM0138 | BKM0138 | EIQLLESGGGLVQPGGSLRLSCAVSGFSITTTGYHW |
| NO: 7302 | VH | heavy chain | NWVRQAPGKGLEWVGYIYSSGSTSYNPSLKSRFTI |
| | | variable region | SRDTSKNTFYLQMNSLRAEDTAVYYCARGDWHY |
| | | | FDYWGQGTMVTVSS |
| SEQ ID | BKM0139 | BKM0139 | EIQLLESGGGLVQPGGSLRLSCAVSGFSITTTGYHW |
| NO: 7302 | VH | heavy chain | NWVRQAPGKGLEWVGYIYSSGSTSYNPSLKSRFTI |
| | | variable region | SRDTSKNTFYLQMNSLRAEDTAVYYCARGDWHY |
| | | | FDYWGQGTMVTVSS |
| SEQ ID | BKM0140 | BKM0140 | EIQLLESGGGLVQPGGSLRLSCAVSGFSITTTGYHW |
| NO: 7302 | VH | heavy chain | NWVRQAPGKGLEWVGYIYSSGSTSYNPSLKSRFTI |
| | | variable region | SRDTSKNTFYLQMNSLRAEDTAVYYCARGDWHY |
| | | | FDYWGQGTMVTVSS |
| SEQ ID | BKM0141 | BKM0141 | EIQLLESGGGLVQPGGSLRLSCAVSGFSITTTGYHW |
| NO: 7302 | VH | heavy chain | NWVRQAPGKGLEWVGYIYSSGSTSYNPSLKSRFTI |
| | | variable region | SRDTSKNTFYLQMNSLRAEDTAVYYCARGDWHY |
| | | | FDYWGQGTMVTVSS |
| SEQ ID | BKM0142 | BKM0142 | EIQLLESGGGLVQPGGSLRLSCAVSGFSITTTGYHW |
| NO: 287 | VH | heavy chain | NWVRQAPGKGLEWVGYIYSSGSTSYAPSLKSRFTI |
| | | variable region | SRDTSKNTFYLQMNSLRAEDTAVYYCARGDWHY |
| | | | FDYWGQGTMVTVSS |
| SEQ ID | BKM0143 | BKM0143 | EIQLLESGGGLVQPGGSLRLSCAVSGFSITTTGYHW |
| NO: 287 | VH | heavy chain | NWVRQAPGKGLEWVGYIYSSGSTSYAPSLKSRFTI |
| | | variable region | SRDTSKNTFYLQMNSLRAEDTAVYYCARGDWHY |
| | | | FDYWGQGTMVTVSS |
| SEQ ID | BKM0144 | BKM0144 | EIQLLESGGGLVQPGGSLRLSCAVSGFSITTTGYHW |
| NO: 287 | VH | heavy chain | NWVRQAPGKGLEWVGYIYSSGSTSYAPSLKSRFTI |
| | | variable region | SRDTSKNTFYLQMNSLRAEDTAVYYCARGDWHY |
| | | | FDYWGQGTMVTVSS |
| SEQ ID | BKM0145 | BKM0145 | EIQLLESGGGLVQPGGSLRLSCAVSGFSITTTGYHW |
| NO: 287 | VH | heavy chain | NWVRQAPGKGLEWVGYIYSSGSTSYAPSLKSRFTI |
| | | variable region | SRDTSKNTFYLQMNSLRAEDTAVYYCARGDWHY |
| | | | FDYWGQGTMVTVSS |
| SEQ ID | BKM0138 | BKM0138 light | DSVTTQSPLSLPVTLGQPASISCSGEKLSDKYVHW |
| NO: 288 | VL | chain variable | YQQRPGQSPRMLIYENDRRPSGVPDRFSGSNSGND |
| | | region | ATLKISRVEAEDVGVYFCQFWDSTASAVFGGGTK |
| | | | VEIK |
| SEQ ID | BKM0139 | BKM0139 light | DSVTTQSPLSLPVTLGQPASISCSGEKLSDKYVHW |
| NO: 289 | VL | chain variable | YQQRPGQSPRMLIYENDRRPSGVPDRFSGSNSGND |
| | | region | ATLKISRVEAEDVGVYFCQFWASTNSAVFGGGTK |
| | | | VEIK |
| SEQ ID | BKM0140 | BKM0140 light | SSETTQPPSVSVSPGQTASITCSGEKLSDKYVHWYQ |
| NO: 290 | VL | chain variable | QKPGQSPVMVIYENDRRPSGIPERFSGSNSGNTATL |
| | | region | TISGTQAMDEADYFCQFWASTNSAVFGGGTQLTV |
| | | | L |
| SEQ ID | BKM0141 | BKM0141 light | SSETTQPPSVSVSPGQTASITCSGEKLSDKYVHWYQ |
| NO: 291 | VL | chain variable | QKPGQSPVMVIYENDRRPSGIPERFSGSNSGNTATL |
| | | region | TISGTQAMDEADYFCQFWDSTASAVFGGGTQLTV |
| | | | L |
| SEQ ID | BKM0142 | BKM0142 light | DSVTTQSPLSLPVTLGQPASISCSGEKLSDKYVHW |
| NO: 7309 | VL | chain variable | YQQRPGQSPRMLIYENDRRPSGVPDRFSGSNSGND |
| | | region | ATLKISRVEAEDVGVYFCQFWDSTNSAVFGGGTK |
| | | | VEIK |
| SEQ ID | BKM0143 | BKM0143 light | SSETTQPPSVSVSPGQTASITCSGEKLSDKYVHWYQ |
| NO: 7305 | VL | chain variable | QKPGQSPVMVIYENDRRPSGIPERFSGSNSGNTATL |
| | | region | TISGTQAMDEADYFCQFWDSTNSAVFGGGTQLTV |
| | | | L |
| SEQ ID | BKM0144 | BKM0144 light | DSVTTQSPLSLPVTLGQPASISCSGEKLSDKYVHW |
| NO: 292 | VL | chain variable | YQQRPGQSPRMLIYENDRRPSGVPDRFSGSNSGND |
| | | region | ATLKISRVEAEDVGVYFCQFWASTASAVFGGGTK |
| | | | VEIK |
| SEQ ID | BKM0145 | BKM0145 light | SSETTQPPSVSVSPGQTASITCSGEKLSDKYVHWYQ |
| NO: 293 | VL | chain variable | QKPGQSPVMVIYENDRRPSGIPERFSGSNSGNTATL |
| | | region | TISGTQAMDEADYFCQFWASTASAVFGGGTQLTV |
| | | | L |

TABLE 10
Exemplary NKp30-targeting antigen binding domains/antibody molecules

| SEQ | | | |
|---|---|---|---|
| ID NO | Ab ID | Description | Sequence |
| SEQ | Ch(anti-NKp30 | 9G1 heavy | QIQLQESGPGLVKPSQSLSLTCSVTGFSINTGGYHWNWIR |
| ID NO: | 9G1)HC | chain | QFPGKKLEWMGYIYSSGSTSYNPSLKSRISITRDTSKNQF |
| 6148 | N297A | | FLQLNSVTTEDTATYYCARGNWHYFDFWGQGTMVTVS |
| | | | SASTKGPSVFPLAPSSKSTSGGTAALGCLVKDYFPEPVTV |
| | | | SWNSGALTSGVHTFPAVLQSSGLYSLSSVVTVPSSSLGT |
| | | | QTYICNVNHKPSNTKVDKRVEPKSCDKTHTCPPCPAPEL |
| | | | LGGPSVFLFPPKPKDTLMISRTPEVTCVVVDVSHEDPEV |
| | | | KFNWYVDGVEVHNAKTKPREEQYASTYRVVSVLTVLH |
| | | | QDWLNGKEYKCKVSNKALPAPIEKTISKAKGQPREPQV |
| | | | CTLPPSREEMTKNQVSLSCAVKGFYPSDIAVEWESNGQP |
| | | | ENNYKTTPPVLDSDGSFFLVSKLTVDKSRWQQGNVFSCS |
| | | | VMHEALHNHYTQKSLSLSPGK |
| SEQ | Ch(anti-NKp30 | 9G1 heavy | QIQLQESGPGLVKPSQSLSLTCSVTGFSINTGGYHWNWIR |
| ID NO: | 9G1)HC | chain | QFPGKKLEWMGYIYSSGSTSYNPSLKSRISITRDTSKNQF |
| 6149 | | | FLQLNSVTTEDTATYYCARGNWHYFDFWGQGTMVTVS |
| | | | SASTKGPSVFPLAPSSKSTSGGTAALGCLVKDYFPEPVTV |
| | | | SWNSGALTSGVHTFPAVLQSSGLYSLSSVVTVPSSSLGT |
| | | | QTYICNVNHKPSNTKVDKRVEPKSCDKTHTCPPCPAPEL |
| | | | LGGPSVFLFPPKPKDTLMISRTPEVTCVVVDVSHEDPEV |
| | | | KFNWYVDGVEVHNAKTKPREEQYNSTYRVVSVLTVLH |
| | | | QDWLNGKEYKCKVSNKALPAPIEKTISKAKGQPREPQV |
| | | | CTLPPSREEMTKNQVSLSCAVKGFYPSDIAVEWESNGQP |
| | | | ENNYKTTPPVLDSDGSFFLVSKLTVDKSRWQQGNVFSCS |
| | | | VMHEALHNHYTQKSLSLSPGK |
| SEQ | Ch(anti-NKp30 | 9G1 light | SYTLTQPPLLSVALGHKATITCSGERLSDKYVHWYQQKP |
| ID NO: | 9G1)LC | chain | GRAPVMVIYENDKRPSGIPDQFSGSNSGNIATLTISKAQA |
| 6150 | | | GYEADYYCQSWDSTNSAVFGSGTQLTVLGQPKANPTVT |
| | | | LFPPSSEELQANKATLVCLISDFYPGAVTVAWKADGSPV |
| | | | KAGVETTKPSKQSNNKYAASSYLSLTPEQWKSHRSYSC |
| | | | QVTHEGSTVEKTVAPTECS |
| SEQ | Ch(anti-NKp30 | 15H6 | QIQLQESGPGLVKPSQSLSLTCSVTGFSINTGGYHWNWIR |
| ID NO: | 15H6)HC | heavy | QFPGKKLEWMGYIYSSGTTRYNPSLKSRISITRDTSKNQF |
| 6151 | N297A | chain | FLQLNSVTPEDTATYYCTRGNWHYFDYWGQGTLVAVS |
| | | | SASTKGPSVFPLAPSSKSTSGGTAALGCLVKDYFPEPVTV |
| | | | SWNSGALTSGVHTFPAVLQSSGLYSLSSVVTVPSSSLGT |
| | | | QTYICNVNHKPSNTKVDKRVEPKSCDKTHTCPPCPAPEL |
| | | | LGGPSVFLFPPKPKDTLMISRTPEVTCVVVDVSHEDPEV |
| | | | KFNWYVDGVEVHNAKTKPREEQYASTYRVVSVLTVLH |
| | | | QDWLNGKEYKCKVSNKALPAPIEKTISKAKGQPREPQV |
| | | | CTLPPSREEMTKNQVSLSCAVKGFYPSDIAVEWESNGQP |
| | | | ENNYKTTPPVLDSDGSFFLVSKLTVDKSRWQQGNVFSCS |
| | | | VMHEALHNHYTQKSLSLSPGK |
| SEQ | Ch(anti-NKp30 | 15H6 | QIQLQESGPGLVKPSQSLSLTCSVTGFSINTGGYHWNWIR |
| ID NO: | 15H6)HC | heavy | QFPGKKLEWMGYIYSSGTTRYNPSLKSRISITRDTSKNQF |
| 6152 | (hole) | chain | FLQLNSVTPEDTATYYCTRGNWHYFDYWGQGTLVAVS |
| | | | SASTKGPSVFPLAPSSKSTSGGTAALGCLVKDYFPEPVTV |
| | | | SWNSGALTSGVHTFPAVLQSSGLYSLSSVVTVPSSSLGT |
| | | | QTYICNVNHKPSNTKVDKRVEPKSCDKTHTCPPCPAPEL |
| | | | LGGPSVFLFPPKPKDTLMISRTPEVTCVVVDVSHEDPEV |
| | | | KFNWYVDGVEVHNAKTKPREEQYNSTYRVVSVLTVLH |
| | | | QDWLNGKEYKCKVSNKALPAPIEKTISKAKGQPREPQV |
| | | | CTLPPSREEMTKNQVSLSCAVKGFYPSDIAVEWESNGQP |
| | | | ENNYKTTPPVLDSDGSFFLVSKLTVDKSRWQQGNVFSCS |
| | | | VMHEALHNHYTQKSLSLSPGK |
| SEQ | Ch(anti-NKp30 | 15H6 light | SYTLTQPPSLSVAPGQKATIICSGENLSDKYVHWYQQKP |
| ID NO: | 15H6)LC | chain | GRAPVMVIYENEKRPSGIPDQFSGSNSGNIATLTISKAQP |
| 6153 | | | GSEADYYCHYWESINSVVFGSGTHLTVLGQPKANPTVT |
| | | | LFPPSSEELQANKATLVCLISDFYPGAVTVAWKADGSPV |
| | | | KAGVETTKPSKQSNNKYAASSYLSLTPEQWKSHRSYSC |
| | | | QVTHEGSTVEKTVAPTECS |
| SEQ | anti-NKp30 | Hamster | QIQLQESGPGLVKPSQSLSLTCSVTGFSINTGGYHWNWIR |
| ID NO: | 9G1 scFv (VH- | anti- | QFPGKKLEWMGYIYSSGSTSYNPSLKSRISITRDTSKNQF |
| 6187 | VL) | NKp30 | FLQLNSVTTEDTATYYCARGNWHYFDFWGQGTMVTVS |
| | | scFv of | SGGGGSGGGGSGGGGSGGGGSSYTLTQPPLLSVALGHK |
| | | 9G1 in VH | ATITCSGERLSDKYVHWYQQKPGRAPVMVIYENDKRPS |
| | | to VL | GIPDQFSGSNSGNIATLTISKAQAGYEADYYCQSWDSTN |
| | | orientation | SAVFGSGTQLTVL |
| SEQ | anti-NKp30 | Hamster | SYTLTQPPLLSVALGHKATITCSGERLSDKYVHWYQQKP |
| ID NO: | 9G1 scFv (VL- | anti- | GRAPVMVIYENDKRPSGIPDQFSGSNSGNIATLTISKAQA |
| 6188 | VH) | NKp30 | GYEADYYCQSWDSTNSAVFGSGTQLTVLGGGGSGGGG |
| | | scFv of | SGGGGSGGGGSQIQLQESGPGLVKPSQSLSLTCSVTGFSI |
| | | 9G1 in VL | NTGGYHWNWIRQFPGKKLEWMGYIYSSGSTSYNPSLKS |
| | | to VH | RISITRDTSKNQFFLQLNSVTTEDTATYYCARGNWHYFD |
| | | orientation | FWGQGTMVTVSS |
| SEQ | anti-NKp30 | Hamster | QIQLQESGPGLVKPSQSLSLTCSVTGFSINTGGYHWNWIR |
| ID NO: | 15H6 scFv | anti- | QFPGKKLEWMGYIYSSGTTRYNPSLKSRISITRDTSKNQF |
| 6189 | (VH-VL) | NKp30 | FLQLNSVTPEDTATYYCTRGNWHYFDYWGQGTLVAVS |
| | | scFv of | SGGGGSGGGGSGGGGSGGGGSSYTLTQPPSLSVAPGQK |
| | | 15H6 in | ATIICSGENLSDKYVHWYQQKPGRAPVMVIYENEKRPSG |
| | | VH to VL | IPDQFSGSNSGNIATLTISKAQPGSEADYYCHYWESINSV |
| | | orientation | VFGSGTHLTVL |
| SEQ | anti-NKp30 | Hamster | SYTLTQPPSLSVAPGQKATIICSGENLSDKYVHWYQQKP |
| ID NO: | 15H6 scFv | anti- | GRAPVMVIYENEKRPSGIPDQFSGSNSGNIATLTISKAQP |
| 6190 | (VL-VH) | NKp30 | GSEADYYCHYWESINSVVFGSGTHLTVLGGGGSGGGGS |
| | | scFv of | GGGGSGGGGSQIQLQESGPGLVKPSQSLSLTCSVTGFSIN |
| | | 15H6 in | TGGYHWNWIRQFPGKKLEWMGYIYSSGTTRYNPSLKSR |
| | | VL to VH | ISITRDTSKNQFFLQLNSVTPEDTATYYCTRGNWHYFDY |
| | | orientation | WGQGTLVAVSS |
| SEQ | | BJM0411 | EIQLLESGGGLVQPGGSLRLSCAVSGFSITTTGYHWNWV |
| ID NO: | | scFv | RQAPGKGLEWVGYIYSSGSTSYNPSLKSRFTISRDTSKNT |
| 7311 | | | FYLQMNSLRAEDTAVYYCARGDWHYFDYWGQGTMVT |
| | | | VSSGGGGSGGGGSGGGGSGGGGSDSVTTQSPLSLPVTLG |
| | | | QPASISCSGEKLSDKYVHWYQQRPGQSPRMLIYENDRRP |
| | | | SGVPDRFSGSNSGNDATLKISRVEAEDVGVYFCQFWDST |
| | | | NSAVFGGGTKVEIK |
| SEQ | BJM0859 | | EIQLLESGGGLVQPGGSLRLSCAVSGFSITTTGYHWNWV |
| ID NO: | lambda scFv | | RQAPGKGLEWVGYIYSSGSTSYNPSLKSRFTISRDTSKNT |
| 7310 | | | FYLQMNSLRAEDTAVYYCARGDWHYFDYWGQGTMVT |
| | | | VSSGGGGSGGGGSGGGGSGGGGSSSETTQPPSVSVSPGQ |
| | | | TASITCSGEKLSDKYVHWYQQKPGQSPVMVIYENDRRP |
| | | | SGIPERFSGSNSGNTATLTISGTQAMDEADYFCQFWDST |
| | | | NSAVFGGGTQLTVL |
| SEQ | BJM0860 | | EIQLLESGGGLVQPGGSLRLSCAVSGFSITTTGYHWNWV |
| ID NO: | kappa scFv | | RQAPGKGLEWVGYIYSSGSTSYNPSLKSRFTISRDTSKNT |
| 7311 | | | FYLQMNSLRAEDTAVYYCARGDWHYFDYWGQGTMVT |
| | | | VSSGGGGSGGGGSGGGGSGGGGSDSVTTQSPLSLPVTLG |
| | | | QPASISCSGEKLSDKYVHWYQQRPGQSPRMLIYENDRRP |
| | | | SGVPDRFSGSNSGNDATLKISRVEAEDVGVYFCQFWDST |
| | | | NSAVFGGGTKVEIK |
| SEQ | BKM0138 | | EIQLLESGGGLVQPGGSLRLSCAVSGFSITTTGYHWNWV |
| ID NO: | scFv | | RQAPGKGLEWVGYIYSSGSTSYNPSLKSRFTISRDTSKNT |
| 294 | | | FYLQMNSLRAEDTAVYYCARGDWHYFDYWGQGTMVT |
| | | | VSSGGGGSGGGGSGGGGSGGGGSDSVTTQSPLSLPVTLG |
| | | | QPASISCSGEKLSDKYVHWYQQRPGQSPRMLIYENDRRP |
| | | | SGVPDRFSGSNSGNDATLKISRVEAEDVGVYFCQFWDST |
| | | | ASAVFGGGTKVEIK |
| SEQ | BKM0139 | | EIQLLESGGGLVQPGGSLRLSCAVSGFSITTTGYHWNWV |
| ID NO: | scFv | | RQAPGKGLEWVGYIYSSGSTSYNPSLKSRFTISRDTSKNT |
| 296 | | | FYLQMNSLRAEDTAVYYCARGDWHYFDYWGQGTMVT |
| | | | VSSGGGGSGGGGSGGGGSGGGGSDSVTTQSPLSLPVTLG |
| | | | QPASISCSGEKLSDKYVHWYQQRPGQSPRMLIYENDRRP |
| | | | SGVPDRFSGSNSGNDATLKISRVEAEDVGVYFCQFWAST |
| | | | NSAVFGGGTKVEIK |
| SEQ | BKM0140 | | EIQLLESGGGLVQPGGSLRLSCAVSGFSITTTGYHWNWV |
| ID NO: | scFv | | RQAPGKGLEWVGYIYSSGSTSYNPSLKSRFTISRDTSKNT |
| 298 | | | FYLQMNSLRAEDTAVYYCARGDWHYFDYWGQGTMVT |
| | | | VSSGGGGSGGGGSGGGGSGGGGSSSETTQPPSVSVSPGQ |
| | | | TASITCSGEKLSDKYVHWYQQKPGQSPVMVIYENDRRP |
| | | | SGIPERFSGSNSGNTATLTISGTQAMDEADYFCQFWAST |
| | | | NSAVFGGGTQLTVL |
| SEQ | BKM0141 | | EIQLLESGGGLVQPGGSLRLSCAVSGFSITTTGYHWNWV |
| ID NO: | scFv | | RQAPGKGLEWVGYIYSSGSTSYNPSLKSRFTISRDTSKNT |
| 299 | | | FYLQMNSLRAEDTAVYYCARGDWHYFDYWGQGTMVT |
| | | | VSSGGGGSGGGGSGGGGSGGGGSSSETTQPPSVSVSPGQ |
| | | | TASITCSGEKLSDKYVHWYQQKPGQSPVMVIYENDRRP |
| | | | SGIPERFSGSNSGNTATLTISGTQAMDEADYFCQFWDST |
| | | | ASAVFGGGTQLTVL |
| SEQ | BKM0142 | | EIQLLESGGGLVQPGGSLRLSCAVSGFSITTTGYHWNWV |
| ID NO: | scFv | | RQAPGKGLEWVGYIYSSGSTSYAPSLKSRFTISRDTSKNT |
| 300 | | | FYLQMNSLRAEDTAVYYCARGDWHYFDYWGQGTMVT |
| | | | VSSGGGGSGGGGSGGGGSGGGGSDSVTTQSPLSLPVTLG |
| | | | QPASISCSGEKLSDKYVHWYQQRPGQSPRMLIYENDRRP |
| | | | SGVPDRFSGSNSGNDATLKISRVEAEDVGVYFCQFWDST |
| | | | NSAVFGGGTKVEIK |
| SEQ | BKM0143 | | EIQLLESGGGLVQPGGSLRLSCAVSGFSITTTGYHWNWV |
| ID NO: | scFv | | RQAPGKGLEWVGYIYSSGSTSYAPSLKSRFTISRDTSKNT |
| 301 | | | FYLQMNSLRAEDTAVYYCARGDWHYFDYWGQGTMVT |
| | | | VSSGGGGSGGGGSGGGGSGGGGSSSETTQPPSVSVSPGQ |
| | | | TASITCSGEKLSDKYVHWYQQKPGQSPVMVIYENDRRP |
| | | | SGIPERFSGSNSGNTATLTISGTQAMDEADYFCQFWDST |
| | | | NSAVFGGGTQLTVL |
| SEQ | BKM0144 | | EIQLLESGGGLVQPGGSLRLSCAVSGFSITTTGYHWNWV |
| ID NO: | scFv | | RQAPGKGLEWVGYIYSSGSTSYAPSLKSRFTISRDTSKNT |
| 302 | | | FYLQMNSLRAEDTAVYYCARGDWHYFDYWGQGTMVT |
| | | | VSSGGGGSGGGGSGGGGSGGGGSDSVTTQSPLSLPVTLG |
| | | | QPASISCSGEKLSDKYVHWYQQRPGQSPRMLIYENDRRP |
| | | | SGVPDRFSGSNSGNDATLKISRVEAEDVGVYFCQFWAST |
| | | | ASAVFGGGTKVEIK |
| SEQ | BKM0145 | | EIQLLESGGGLVQPGGSLRLSCAVSGFSITTTGYHWNWV |
| ID NO: | scFv | | RQAPGKGLEWVGYIYSSGSTSYAPSLKSRFTISRDTSKNT |
| 303 | | | FYLQMNSLRAEDTAVYYCARGDWHYFDYWGQGTMVT |
| | | | VSSGGGGSGGGGSGGGGSGGGGSSSETTQPPSVSVSPGQ |
| | | | TASITCSGEKLSDKYVHWYQQKPGQSPVMVIYENDRRP |
| | | | SGIPERFSGSNSGNTATLTISGTQAMDEADYFCQFWAST |
| | | | ASAVFGGGTQLTVL |

[0551] In some embodiments, the NK cell engager is an antigen binding domain that binds to NKp46 (e.g., NKp46 present, e.g., expressed or displayed, on the surface of an NK cell) and comprises any CDR amino acid sequence, framework region (FWR) amino acid sequence, or variable region amino acid sequence disclosed in Table 15. In some embodiments, binding of the NK cell engager, e.g., antigen binding domain that binds to NKp46, to the NK cell activates the NK cell. An antigen binding domain that binds to NKp46 (e.g., NKp46 present, e.g., expressed or displayed, on the surface of an NK cell) may be said to target NKp46, the NK cell, or both.

[0552] In some embodiments, the NK cell engager is an antigen binding domain that binds to NKG2D (e.g., NKG2D present, e.g., expressed or displayed, on the surface of an NK cell) and comprises any CDR amino acid sequence, framework region (FWR) amino acid sequence, or variable region amino acid sequence disclosed in Table 15. In some embodiments, binding of the NK cell engager, e.g., antigen binding domain that binds to NKG2D, to the NK cell activates the NK cell. An antigen binding domain that binds to NKG2D (e.g., NKG2D present, e.g., expressed or displayed, on the surface of an NK cell) may be said to target NKG2D, the NK cell, or both.

[0553] In some embodiments, the NK cell engager is an antigen binding domain that binds to CD16 (e.g., CD16 present, e.g., expressed or displayed, on the surface of an NK cell) and comprises any CDR amino acid sequence, framework region (FWR) amino acid sequence, or variable region amino acid sequence disclosed in Table 15. In some embodiments, binding of the NK cell engager, e.g., antigen binding domain that binds to CD16, to the NK cell activates the NK cell. An antigen binding domain that binds to CD16 (e.g., CD16 present, e.g., expressed or displayed, on the surface of an NK cell) may be said to target CD16, the NK cell, or both.

TABLE 15
Exemplary variable regions of NKp46, NKG2D,
or CD16-targeting antigen binding domains

| SEQ | | De- | |
|---|---|---|---|
| ID | Ab | scrip- | |
| NO | ID | tion | Sequence |
| SEQ | NKG2D_ | scFV | QVHLQESGPGLVKPSETLSLTCTVSDDS |
| ID | 1 | that | ISSYYWSWIRQPPGKGLEWIGHISYSGS |
| NO: | scFV | binds | ANYNPSLKSRVTISVDTSKNQFSLKLSS |
| 6175 | | NKG2D | VTAADTAVYYCANWDDAFNIWGQGTMVT |
| | | | VSSGGGGSGGGGSGGGGSGGGGSEIVLT |
| | | | QSPGTLSLSPGERATLSCRASQSVSSSY |
| | | | LAWYQQKPGQAPRLLIYGASSRATGIPD |
| | | | RFSGSGSGTDFTLTISRLEPEDFAVYYC |
| | | | QQYGSSPWTFGQGTKVEIK |
| SEQ | NKG2D_ | VH | QVHLQESGPGLVKPSETLSLTCTVSDDS |
| ID | 1 | that | ISSYYWSWIRQPPGKGLEWIGHISYSGS |
| NO: | VH | binds | ANYNPSLKSRVTISVDTSKNQFSLKLSS |
| 6176 | | NKG2D | VTAADTAVYYCANWDDAFNIWGQGTMVT |
| | | | VSS |
| SEQ | NKG2D_ | VL | EIVLTQSPGTLSLSPGERATLSCRASQS |
| ID | 1 | that | VSSSYLAWYQQKPGQAPRLLIYGASSRA |
| NO: | VL | binds | TGIPDRFSGSGSGTDFTLTISRLEPEDF |
| 6177 | | NKG2D | AVYYCQQYGSSPWTFGQGTKVEIK |
| SEQ | NKG2D_ | scFV | EVQLVQSGAEVKEPGESLKISCKNSGYS |
| ID | 2 | that | FTNYWVGWVRQMPGKGLEWMGIIYPGDS |
| NO: | scFV | binds | DTRYSPSFQGQVTISADKSINTAYLQSW |
| 6178 | | NKG2D | SLKASDTAMYYCGRLTMFRGIIIGYFDY |
| | | | WGQGTLVTVSSGGGGSGGGGSGGGGSGG |
| | | | GGSEIVLTQSPATLSLSPGERATLSCRA |
| | | | SQSVSSYLAWYQQKPGQAPRLLIYDASN |
| | | | RATGIPARFSGSGSGTDFTLTISSLEPE |
| | | | DFAVYYCQQRSNWPWTFGQGTKVEIK |
| SEQ | NKG2D_ | VH | EVQLVQSGAEVKEPGESLKISCKNSGYS |
| ID | 2 | that | FTNYWVGWVRQMPGKGLEWMGIIYPGDS |
| NO: | VH | binds | DTRYSPSFQGQVTISADKSINTAYLQWS |
| 6179 | | NKG2D | SLKASDTAMYYCGRLTMFRGIIIGYFDY |
| | | | WGQGTLVTVSS |
| SEQ | NKG2D_ | VL | EIVLTQSPATLSLSPGERATLSCRASQS |
| ID | 2 | that | VSSYLAWYQQKPGQAPRLLIYDASNRAT |
| NO: | VL | binds | GIPARFSGSGSGTDFTLTISSLEPEDFA |
| 6180 | | NKG2D | VYYCQQRSNWPWTFGQGTKVEIK |
| SEQ | NKp46 | scFV | QVQLQQSGPELVKPGASVKMSCKASGYT |
| ID | scFV | that | FTDYVINWGKQRSGQGLEWIGEIYPGSG |
| NO: | | binds | TNYYNEKFKAKATLTADKSSNIAYMQLS |
| 6181 | | NKp46 | SLTSEDSAVYFCARRGRYGLYAMDYWGQ |
| | | | GTSVTVSSGGGGSGGGGSGGGGSGGGGS |
| | | | DIQMTQTTSSLSASLGDRVTISCRASQD |
| | | | ISNYLNWYQQKPDGTVKLLIYYTSRLHS |
| | | | GVPSRFSGSGSGTDYSLTINNLEQEDIA |
| | | | TYFCQQGNTRPWTFGGGTKLEIK |
| SEQ | NKp46 | VH | QVQLQQSGPELVKPGASVKMSCKASGYT |
| ID | VH | that | FTDYVINWGKQRSGQGLEWIGEIYPGSG |
| NO: | | binds | TNYYNEKFKAKATLTADKSSNIAYMQLS |
| 6182 | | NKp46 | SLTSEDSAVYFCARRGRYGLYAMDYWGQ |
| | | | GTSVTVSS |
| SEQ | NKp46 | VL | DIQMTQTTSSLSASLGDRVTISCRASQD |
| ID | VL | that | ISNYLNWYQQKPDGTVKLLIYYTSRLHS |
| NO: | | binds | GVPSRFSGSGSGTDYSLTINNLEQEDIA |
| 6183 | | NKp46 | TYFCQQGNTRPWTFGGGTKLEIK |
| SEQ | CD16 | scFV | EVQLVESGGGVVRPGGSLRLSCAASGFT |
| ID | scFV | that | FDDYGMSWVRQAPGKGLEWVSGINWNGG |
| NO: | | binds | STGYADSVKGRFTISRDNAKNSLYLQMN |
| 6184 | | CD16 | SLRAEDTAVYYCARGRSLLFDYWGQGTL |
| | | | VTVSRGGGGSGGGGSGGGGSSELTQDPA |
| | | | VSVALGQTVRITCQGDSLRSYYASWYQQ |
| | | | KPGQAPVLVIYGKNNRPSGIPDRFSGSS |
| | | | SGNTASLTITGAQAEDEADYYCNSRDSS |
| | | | GNHVVFGGGTKLTVL |
| SEQ | CD16 | VH | EVQLVESGGGVVRPGGSLRLSCAASGFT |
| ID | VH | that | FDDYGMSWVRQAPGKGLEWVSGINWNGG |
| NO: | | binds | STGYADSVKGRFTISRDNAKNSLYLQMN |
| 6185 | | CD16 | SLRAEDTAVYYCARGRSLLFDYWGQGTL |
| | | | VTVSR |
| SEQ | CD16 | VL | SSELTQDPAVSVALGQTVRITCQGDSLR |
| ID | VL | that | SYYASWYQQKPGQAPVLVIYGKNNRPSG |
| NO: | | binds | IPDRFSGSSSGNTASLTITGAQAEDEAD |
| 6186 | | CD16 | YYCNSRDSSGNHVVFGGGTKLTVL |

[0554] In one embodiment, the NK cell engager is a ligand of NKp30, e.g., is a1B7-6, e.g., comprises the amino acid sequence of:

[0555] DLKVEMMAGGTQITPLNDNVTIFCNIFYSQPLNITSMGITWFWKSLTFDKEVKVFEFFGDH QEAFRPGAIV SPWRLKSGDASLRLPGIQLEEAGEYRCEVVVTPLKAQGTVQLEVVASPASRLLLDQV GMKENEDKYMCESSGFYPEAINITWEKQTQKFPHPIEISEDVITGPTIKNMDGTFNVTSCLKLNSSQE DPGTVYQCVVRHASLHTPLRSNFTLTAARHSLSETEKTDNFS (SEQ ID NO: 24), a fragment thereof, or an amino acid sequence substantially identical thereto (e.g., 95% to 99.9% identical thereto, or having at least one amino acid alteration, but not more than five, ten or fifteen alterations (e.g., substitutions, deletions, or insertions, e.g., conservative substitutions) to the amino acid sequence of SEQ ID NO: 24.

[0556] In other embodiments, the NK cell engager is a ligand of NKp44 or NKp46, which is a viral HA. Viral hemagglutinins (HA) are glyco proteins which are on the surface of viruses. HA proteins allow viruses to bind to the membrane of cells via sialic acid sugar moieties which contributes to the fusion of viral membranes with the cell membranes (see e.g., Eur J Immunol. 2001 September; 31(9):2680-9 “Recognition of viral hemagglutinins by NKp44 but not by NKp30”; and Nature. 2001 Feb. 22; 409(6823): 1055-60 “Recognition of haemagglutinins on virus-infected cells by NKp46 activates lysis by human NK cells” the contents of each of which are incorporated by reference herein).

[0557] In other embodiments, the NK cell engager is a ligand of NKG2D chosen from MICA, MICB, or ULBP1, e.g., wherein:

(i) MICA comprises the amino acid sequence: EPHSLRYNLTVLSWDGSVQSGFLTEVHLDGQPFLRCDRQKCRAKPQGQWAEDVLGNKTWDRETR DLTGNGKDLRMTLAHIKDQKEGLHSLQEIRVCEIHEDNSTRSSQHFYYDGELFLSQNLETKEWTMP QSSRAQTLAMNVRNFLKEDAMKTKTHYHAMHADCLQELRRYLKSGVVLRRTVPPMVNVTRSEAS EGNITVTCRASGFYPWNITLSWRQDGVSLSHDTQQWGDVLPDGNGTYQTWVATRICQGEEQRFTC YMEHSGNHSTHPVPSGKVLVLQSHW (SEQ ID NO: 25), a fragment thereof, or an amino acid sequence substantially identical thereto (e.g., 95% to 99.9% identical thereto, or having at least one amino acid alteration, but not more than five, ten or fifteen alterations (e.g., substitutions, deletions, or insertions, e.g., conservative substitutions) to the amino acid sequence of SEQ ID NO: 25;
(ii) MICB comprises the amino acid sequence: AEPHSLRYNLMVLSQDESVQSGFLAEGHLDGQPFLRYDRQKRRAKPQGQWAEDVLGAKTWDTET EDLTENGQDLRRTLTHIKDQKGGLHSLQEIRVCEIHEDSSTRGSRHFYYDGELFLSQNLETQESTVPQ SSRAQTLAMNVTNFWKEDAMKTKTHYRAMQADCLQKLQRYLKSGVAIRRTVPPMVNVTCSEVSE GNITVTCRASSFYPRNITLTWRQDGVSLSHNTQQWGDVLPDGNGTYQTWVATRIRQGEEQRFTCY MEHSGNHGTHPVPSGKVLVLQSQRTD (SEQ ID NO: 26), a fragment thereof, or an amino acid sequence substantially identical thereto (e.g., 95% to 99.9% identical thereto, or having at least one amino acid alteration, but not more than five, ten or fifteen alterations (e.g., substitutions, deletions, or insertions, e.g., conservative substitutions) to the amino acid sequence of SEQ ID NO: 26; or
(iii) ULBP1 comprises the amino acid sequence: GWVDTHCLCYDFIITPKSRPEPQWCEVQGLVDERPFLHYDCVNHKAKAFASLGKKVNVTKTWEEQ TETLRDVVDFLKGQLLDIQVENLIPIEPLTLQARMSCEHEAHGHGRGSWQFLFNGQKFLLFDSNNRK WTALHPGAKKMTEKWEKNRDVTMFFQKISLGDCKMWLEEFLMYWEQMLDPTKPPSLAPG (SEQ ID NO: 27), a fragment thereof, or an amino acid sequence substantially identical thereto (e.g., 95% to 99.9% identical thereto, or having at least one amino acid alteration, but not more than five, ten or fifteen alterations (e.g., substitutions, deletions, or insertions, e.g., conservative substitutions) to the amino acid sequence of SEQ ID NO: 27.

[0558] In other embodiments, the NK cell engager is a ligand of DNAM1 chosen from NECTIN2 or NECL5, e.g., wherein:

(i) NECTIN2 comprises the amino acid sequence: QDVRVQVLPEVRGQLGGTVELPCHLLPPVPGLYISLVTWQRPDAPANHQNVAAFHPKMGPSFPSPK PGSERLSFVSAKQSTGQDTEAELQDATLALHGLTVEDEGNYTCEFATFPKGSVRGMTWLRVIAKPK NQAEAQKVTFSQDPTTVALCISKEGRPPARISWLSSLDWEAKETQVSGTLAGTVTVTSRFTLVPSGR ADGVTVTCKVEHESFEEPALIPVTLSVRYPPEVSISGYDDNWYLGRTDATLSCDVRSNPEPTGYDWS TTSGTFPTSAVAQGSQLVIHAVDSLFNTTFVCTVTNAVGMGRAEQVIFVRETPNTAGAGATGG (SEQ ID NO: 28), a fragment thereof, or an amino acid sequence substantially identical thereto (e.g., 95% to 99.9% identical thereto, or having at least one amino acid alteration, but not more than five, ten or fifteen alterations (e.g., substitutions, deletions, or insertions, e.g., conservative substitutions) to the amino acid sequence of SEQ ID NO: 28; or
(ii) NECL5 comprises the amino acid sequence: WPPPGTGDVVVQAPTQVPGFLGDSVTLPCYLQVPNMEVTHVSQLTWARHGESGSMAVFHQTQGPS YSESKRLEFVAARLGAELRNASLRMFGLRVEDEGNYTCLFVTFPQGSRSVDIWLRVLAKPQNTAEV QKVQLTGEPVPMARCVSTGGRPPAQITWHSDLGGMPNTSQVPGFLSGTVTVTSLWILVPSSQVDGK NVTCKVEHESFEKPQLLTVNLTVYYPPEVSISGYDNNWYLGQNEATLTCDARSNPEPTGYNWSTTM GPLPPFAVAQGAQLLIRPVDKPINTTLICNVTNALGARQAELTVQVKEGPPSEHSGISRN (SEQ ID NO: 29), a fragment thereof, or an amino acid sequence substantially identical thereto (e.g., 95% to 99.9% identical thereto, or having at least one amino acid alteration, but not more than five, ten or fifteen alterations (e.g., substitutions, deletions, or insertions, e.g., conservative substitutions) to the amino acid sequence of SEQ ID NO: 29.

[0559] In yet other embodiments, the NK cell engager is a ligand of DAP10, which is an adapter for NKG2D (see e.g., Proc Natl Acad Sci USA. 2005 May 24; 102(21): 7641-7646; and Blood, 15 Sep. 2011 Volume 118, Number 11, the full contents of each of which is incorporated by reference herein).

[0560] In other embodiments, the NK cell engager is a ligand of CD16, which is a CD16a/b ligand, e.g., a CD16a/b ligand further comprising an antibody Fc region (see e.g., Front Immunol. 2013; 4: 76 discusses how antibodies use the Fc to trigger NK cells through CD16, the full contents of which are incorporated herein).

[0561] In other embodiments, the NK cell engager is a ligand of CRTAM, which is NECL2, e.g., wherein NECL2 comprises the amino acid sequence: QNLFTKDVTVIEGEVATISCQVNKSDDSVIQLLNPNRQTIYFRDFRPLKDSRFQLLNFSSSELKVSLTN VSISDEGRYFCQLYTDPPQESYTTITVLVPPRNLMIDIQKDTAVEGEEIEVNCTAMASKPATTIRWFK GNTELKGKSEVEEWSDMYTVTSQLMLKVHKEDDGVPVICQVEHPAVTGNLQTQRYLEVQYKPQV HIQMTYPLQGLTREGDALELTCEAIGKPQPVMVTWVRVDDEMPQHAVLSGPNLFINNLNKTDNGT YRCEASNIVGKAHSDYMLYVYDPPTTIPPPTTTTTTTTTTTTTILTIITDSRAGEEGSIRAVDH (SEQ ID NO: 30), a fragment thereof, or an amino acid sequence substantially identical thereto (e.g., 95% to 99.9% identical thereto, or having at least one amino acid alteration, but not more than five, ten or fifteen alterations (e.g., substitutions, deletions, or insertions, e.g., conservative substitutions) to the amino acid sequence of SEQ ID NO: 30.

[0562] In other embodiments, the NK cell engager is a ligand of CD27, which is CD70, e.g., wherein CD70 comprises the amino acid sequence: QRFAQAQQQLPLESLGWDVAELQLNHTGPQQDPRLYWQGGPALGRSFLHGPELDKGQLRIHRDGI YMVHIQVTLAICSSTTASRHHPTTLAVGICSPASRSISLLRLSFHQGCTIASQRLTPLARGDTLCTNLT GTLLPSRNTDETFFGVQWVRP (SEQ ID NO: 31), a fragment thereof, or an amino acid sequence substantially identical thereto (e.g., 95% to 99.9% identical thereto, or having at least one amino acid alteration, but not more than five, ten or fifteen alterations (e.g., substitutions, deletions, or insertions, e.g., conservative substitutions) to the amino acid sequence of SEQ ID NO: 31.

[0563] In other embodiments, the NK cell engager is a ligand of PSGL1, which is L-selectin (CD62L), e.g., wherein L-selectin comprises the amino acid sequence: WTYHYSEKPMNWQRARRFCRDNYTDLVAIQNKAEIEYLEKTLPFSRSYYWIGIRKIGGIWTWVGTN KSLTEEAENWGDGEPNNKKNKEDCVEIYIKRNKDAGKWNDDACHKLKAALCYTASCQPWSCSGH GECVEIINNYTCNCDVGYYGPQCQFVIQCEPLEAPELGTMDCTHPLGNFSFSSQCAFSCSEGTNLTGI EETTCGPFGNWSSPEPTCQVIQCEPLSAPDLGIMNCSHPLASFSFTSACTFICSEGTELIGKKKTICESS GIWSNPSPICQKLDKSFSMIKEGDYN (SEQ ID NO: 32), a fragment thereof, or an amino acid sequence substantially identical thereto (e.g., 95% to 99.9% identical thereto, or having at least one amino acid alteration, but not more than five, ten or fifteen alterations (e.g., substitutions, deletions, or insertions, e.g., conservative substitutions) to the amino acid sequence of SEQ ID NO: 32.

[0564] In other embodiments, the NK cell engager is a ligand of CD96, which is NECL5, e.g., wherein NECL5 comprises the amino acid sequence: WPPPGTGDVVVQAPTQVPGFLGDSVTLPCYLQVPNMEVTHVSQLTWARHGESGSMAVFHQTQGPS YSESKRLEFVAARLGAELRNASLRMFGLRVEDEGNYTCLFVTFPQGSRSVDIWLRVLAKPQNTAEV QKVQLTGEPVPMARCVSTGGRPPAQITWHSDLGGMPNTSQVPGFLSGTVTVTSLWILVPSSQVDGK NVTCKVEHESFEKPQLLTVNLTVYYPPEVSISGYDNNWYLGQNEATLTCDARSNPEPTGYNWSTTM GPLPPFAVAQGAQLLIRPVDKPINTTLICNVTNALGARQAELTVQVKEGPPSEHSGISRN (SEQ ID NO: 29), a fragment thereof, or an amino acid sequence substantially identical thereto (e.g., 95% to 99.9% identical thereto, or having at least one amino acid alteration, but not more than five, ten or fifteen alterations (e.g., substitutions, deletions, or insertions, e.g., conservative substitutions) to the amino acid sequence of SEQ ID NO: 30.

[0565] In other embodiments, the NK cell engager is a ligand of CD100 (SEMA4D), which is CD72, e.g., wherein CD72 comprises the amino acid sequence: RYLQVSQQLQQTNRVLEVTNSSLRQQLRLKITQLGQSAEDLQGSRRELAQSQEALQVEQRAHQAAE GQLQACQADRQKTKETLQSEEQQRRALEQKLSNMENRLKPFFTCGSADTCCPSGWIMHQKSCFYIS LTSKNWQESQKQCETLSSKLATFSEIYPQSHSYYFLNSLLPNGGSGNSYWTGLSSNKDWKLTDDTQ RTRTYAQSSKCNKVHKTWSWWTLESESCRSSLPYICEMTAFRFPD (SEQ ID NO: 33), a fragment thereof, or an amino acid sequence substantially identical thereto (e.g., 95% to 99.9% identical thereto, or having at least one amino acid alteration, but not more than five, ten or fifteen alterations (e.g., substitutions, deletions, or insertions, e.g., conservative substitutions) to the amino acid sequence of SEQ ID NO: 33.

[0566] In other embodiments, the NK cell engager is a ligand of NKp80, which is CLEC2B (AICL), e.g., wherein CLEC2B (AICL) comprises the amino acid sequence: KLTRDSQSLCPYDWIGFQNKCYYFSKEEGDWNSSKYNCSTQHADLTIIDNIEEMNFLRRYKCSSDH WIGLKMAKNRTGQWVDGATFTKSFGMRGSEGCAYLSDDGAATARCYTERKWICRKRIH (SEQ ID NO: 34), a fragment thereof, or an amino acid sequence substantially identical thereto (e.g., 95% to 99.9% identical thereto, or having at least one amino acid alteration, but not more than five, ten or fifteen alterations (e.g., substitutions, deletions, or insertions, e.g., conservative substitutions) to the amino acid sequence of SEQ ID NO: 34.

[0567] In other embodiments, the NK cell engager is a ligand of CD244, which is CD48, e.g., wherein CD48 comprises the amino acid sequence: QGHLVHMTVVSGSNVTLNISESLPENYKQLTWFYTFDQKIVEWDSRKSKYFESKFKGRVRLDPQSG ALYISKVQKEDNSTYIMRVLKKTGNEQEWKIKLQVLDPVPKPVIKIEKIEDMDDNCYLKLSCVIPGE SVNYTWYGDKRPFPKELQNSVLETTLMPHNYSRCYTCQVSNSVSSKNGTVCLSPPCTLARS (SEQ ID NO: 35), a fragment thereof, or an amino acid sequence substantially identical thereto (e.g., 95% to 99.9% identical thereto, or having at least one amino acid alteration, but not more than five, ten or fifteen alterations (e.g., substitutions, deletions, or insertions, e.g., conservative substitutions) to the amino acid sequence of SEQ ID NO: 35.

[0568] In some embodiments, the NK cell engager is a viral hemagglutinin (HA), HA is a glycoprotein found on the surface of influenza viruses. It is responsible for binding the virus to cells with sialic acid on the membranes, such as cells in the upper respiratory tract or erythrocytes. HA has at least 18 different antigens. These subtypes are named H1 through H18. NCRs can recognize viral proteins. NKp46 has been shown to be able to interact with the HA of influenza and the HA-NA of Paramyxovirus, including Sendai virus and Newcastle disease virus. Besides NKp46, NKp44 can also functionally interact with HA of different influenza subtypes.

[0569] In some embodiments of any of the multifunctional molecules described herein, the immune cell engager is an NK cell engager, e.g., an NK cell engager that mediates binding to and activation of an NK cell, or an NK cell engager that mediates binding to but not activation of an NK cell. In certain embodiments, the NK cell engager is chosen from an antibody molecule, e.g., an antigen binding domain, or ligand that binds to (e.g., activates): NKp30, NKp40, NKp44, NKp46, NKG2D, DNAM1, DAP10, CD16 (e.g., CD16a, CD16b, or both), CRTAM, CD27, PSGL1, CD96, CD100 (SEMA4D), NKp80, CD244 (also known as SLAMF4 or 2B4), SLAMF6, SLAMF7, KIR2DS2, KIR2DS4, KIR3DS1, KIR2DS3, KIR2DS5, KIR2DS1, CD94, NKG2C, NKG2E, or CD160, e.g., the NK cell engager is an antibody molecule or ligand that binds to (e.g., activates) NKp30. In certain embodiments, the NK cell engager is an antibody molecule, e.g., an antigen binding domain.

[0570] In some embodiments, the NK cell engager is capable of engaging an NK cell.

[0571] In some embodiments, the NK cell engager is an antibody molecule, e.g., an antigen binding domain, that binds to NKp30, NKp46, NKG2D, or CD16.

[0572] In some embodiments, the multifunctional molecule:

(i) binds specifically to an epitope of NKp30, NKp46, NKG2D, or CD16, e.g., the same or similar epitope as the epitope recognized by an anti-NKp30, anti-NKp46, anti-NKG2D, or anti-CD16 antibody molecule as described herein;
(ii) shows the same or similar binding affinity or specificity, or both, as an anti-NKp30, anti-NKp46, anti-NKG2D, or anti-CD16 antibody molecule as described herein;
(iii) inhibits, e.g., competitively inhibits, the binding of an anti-NKp30, anti-NKp46, anti-NKG2D, or anti-CD16 antibody molecule as described herein;
(iv) binds the same or an overlapping epitope with an anti-NKp30, anti-NKp46, anti-NKG2D, or anti-CD16 antibody molecule as described herein; or
(v) competes for binding, and/or binds the same epitope, with an anti-NKp30, anti-NKp46, anti-NKG2D, or anti-CD16 molecule as described herein.

[0573] In some embodiments, the anti-NKp30, anti-NKp46, anti-NKG2D, or anti-CD16 antibody molecule comprises one or more CDRs, framework regions, variable domains, heavy or light chains, or an antigen binding domain chosen from Tables 7-10 or 15, or a sequence substantially identical thereto. In some embodiments, the NK cell engager is an antibody molecule, e.g., an antigen binding domain, that binds to NKp30. In some embodiments, lysis of the lymphoma cell or lymphocyte is mediated by NKp30. In some embodiments, the multifunctional molecule does not activate the NK cell when incubated with the NK cell in the absence of the tumor antigen on the lymphoma cell or TRBC1 or TRBC2 on the lymphocyte. In some embodiments, the multifunctional molecule activates the NK cell when the NK cell is a NKp30 expressing NK cell and either: (1) the tumor antigen on the lymphoma cell is also present or (2) TRBC1 or TRBC2 on the lymphocyte is also present. In some embodiments, the multifunctional molecule does not activate the NK cell when the NK cell is not a NKp30 expressing NK cell and either: (1) the tumor antigen on the lymphoma cell is also present or (2) TRBC1 or TRBC2 on the lymphocyte is also present.

[0574] In some embodiments, the NK cell engager comprises:

(i) a heavy chain variable region (VH) comprising a heavy chain complementarity determining region 1 (VHCDR1) amino acid sequence of SEQ ID NO: 6000 (or a sequence with no more than 1, 2, 3, or 4 mutations, e.g., substitutions, additions, or deletions), a VHCDR2 amino acid sequence of SEQ ID NO: 6001 (or a sequence with no more than 1, 2, 3, or 4 mutations, e.g., substitutions, additions, or deletions), and/or a VHCDR3 amino acid sequence of SEQ ID NO: 6002 (or a sequence with no more than 1, 2, 3, or 4 mutations, e.g., substitutions, additions, or deletions), and
(ii) a light chain variable region (VL) comprising a light chain complementarity determining region 1 (VLCDR1) amino acid sequence of SEQ ID NO: 6063 (or a sequence with no more than 1, 2, 3, or 4 mutations, e.g., substitutions, additions, or deletions), a VLCDR2 amino acid sequence of SEQ ID NO: 6064 (or a sequence with no more than 1, 2, 3, or 4 mutations, e.g., substitutions, additions, or deletions), and/or a VLCDR3 amino acid sequence of SEQ ID NO: 6065 (or a sequence with no more than 1, 2, 3, or 4 mutations, e.g., substitutions, additions, or deletions).

[0575] In some embodiments, the NK cell engager comprises:

(i) a heavy chain variable region (VH) comprising a heavy chain complementarity determining region 1 (VHCDR1) amino acid sequence of SEQ ID NO: 6000, a VHCDR2 amino acid sequence of SEQ ID NO: 6001, and/or a VHCDR3 amino acid sequence of SEQ ID NO: 6002, and
(ii) a light chain variable region (VL) comprising a light chain complementarity determining region 1 (VLCDR1) amino acid sequence of SEQ ID NO: 6063, a VLCDR2 amino acid sequence of SEQ ID NO: 6064, and/or a VLCDR3 amino acid sequence of SEQ ID NO: 6065.

[0576] In some embodiments, the NK cell engager comprises:

(1) a heavy chain variable region (VH) comprising a heavy chain framework region 1 (VHFWR1) amino acid sequence of SEQ ID NO: 6003 (or a sequence with no more than 1, 2, 3, 4, 5, or 6 mutations, e.g., substitutions, additions, or deletions, therefrom), a VHFWR2 amino acid sequence of SEQ ID NO: 6004 (or a sequence with no more than 1, 2, 3, 4, 5, or 6 mutations, e.g., substitutions, additions, or deletions, therefrom), a VHFWR3 amino acid sequence of SEQ ID NO: 6005 (or a sequence with no more than 1, 2, 3, 4, 5, or 6 mutations, e.g., substitutions, additions, or deletions, therefrom), or a VHFWR4 amino acid sequence of SEQ ID NO: 6006 (or a sequence with no more than 1, 2, 3, 4, 5, or 6 mutations, e.g., substitutions, additions, or deletions, therefrom), and/or
(2) a light chain variable region (VL) comprising a light chain framework region 1 (VLFWR1) amino acid sequence of SEQ ID NO: 6066 (or a sequence with no more than 1, 2, 3, 4, 5, or 6 mutations, e.g., substitutions, additions, or deletions, therefrom), a VLFWR2 amino acid sequence of SEQ ID NO: 6067 (or a sequence with no more than 1, 2, 3, 4, 5, or 6 mutations, e.g., substitutions, additions, or deletions, therefrom), a VLFWR3 amino acid sequence of SEQ ID NO: 6068 (or a sequence with no more than 1, 2, 3, 4, 5, or 6 mutations, e.g., substitutions, additions, or deletions, therefrom), or a VLFWR4 amino acid sequence of SEQ ID NO: 6069 (or a sequence with no more than 1, 2, 3, 4, 5, or 6 mutations, e.g., substitutions, additions, or deletions, therefrom).

[0577] In some embodiments, the NK cell engager comprises:

(1) a heavy chain variable region (VH) comprising a heavy chain framework region 1 (VHFWR1) amino acid sequence of SEQ ID NO: 6003, a VHFWR2 amino acid sequence of SEQ ID NO: 6004, a VHFWR3 amino acid sequence of SEQ ID NO: 6005, or a VHFWR4 amino acid sequence of SEQ ID NO: 6006, and
(3) a light chain variable region (VL) comprising a light chain framework region 1 (VLFWR1) amino acid sequence of SEQ ID NO: 6066, a VLFWR2 amino acid sequence of SEQ ID NO: 6067, a VLFWR3 amino acid sequence of SEQ ID NO: 6068, or a VLFWR4 amino acid sequence of SEQ ID NO: 6069.

[0578] In some embodiments, the NK cell engager comprises:

(i) a VH comprising the amino acid sequence of SEQ ID NO: 6121 (or an amino acid sequence having at least about 75%, 80%, 85%, 90%, 95%, or 99% sequence identity to SEQ ID NO: 6121), and/or
(ii) a VL comprising the amino acid sequence of SEQ ID NO: 6135 (or an amino acid sequence having at least about 93%, 95%, or 99% sequence identity to SEQ ID NO: 6135).

[0579] In some embodiments, the NK cell engager comprises a heavy chain comprising the amino acid sequence of SEQ ID NOs: 6148 or 6149 (or an amino acid sequence having at least about 75%, 80%, 85%, 90%, 95%, or 99% sequence identity to SEQ ID NOs: 6148 or 6149).

[0580] In some embodiments, the NK cell engager comprises a light chain comprising the amino acid sequence of SEQ ID NO: 6150 (or an amino acid sequence having at least about 75%, 80%, 85%, 90%, 95%, or 99% sequence identity to SEQ ID NO: 6150).

[0581] In some embodiments, the NK cell engager comprises a heavy chain comprising the amino acid sequence of SEQ ID NOs: 6148 or 6149 (or an amino acid sequence having at least about 75%, 80%, 85%, 90%, 95%, or 99% sequence identity to SEQ ID NOs: 6148 or 6149), and a light chain comprising the amino acid sequence of SEQ ID NO: 6150 (or an amino acid sequence having at least about 75%, 80%, 85%, 90%, 95%, or 99% sequence identity to SEQ ID NO: 6150).

[0582] In some embodiments, the NK cell engager comprises a heavy chain variable region (VH) comprising a heavy chain framework region 1 (VHFWR1) amino acid sequence of SEQ ID NO: 6014 (or a sequence with no more than 1, 2, 3, 4, 5, or 6 mutations, e.g., substitutions, additions, or deletions, therefrom), a VHFWR2 amino acid sequence of SEQ ID NO: 6015 (or a sequence with no more than 1, 2, 3, 4, 5, or 6 mutations, e.g., substitutions, additions, or deletions, therefrom), a VHFWR3 amino acid sequence of SEQ ID NO: 6016 (or a sequence with no more than 1, 2, 3, 4, 5, or 6 mutations, e.g., substitutions, additions, or deletions, therefrom), or a VHFWR4 amino acid sequence of SEQ ID NO: 6017 (or a sequence with no more than 1, 2, 3, 4, 5, or 6 mutations, e.g., substitutions, additions, or deletions, therefrom).

[0583] In some embodiments, the NK cell engager comprises a heavy chain variable region (VH) comprising a heavy chain framework region 1 (VHFWR1) amino acid sequence of SEQ ID NO: 6014, a VHFWR2 amino acid sequence of SEQ ID NO: 6015, a VHFWR3 amino acid sequence of SEQ ID NO: 6016, or a VHFWR4 amino acid sequence of SEQ ID NO: 6017.

[0584] In some embodiments, the NK cell engager comprises a VH comprising the amino acid sequence of SEQ ID NO: 6123 (or an amino acid sequence having at least about 75%, 80%, 85%, 90%, 95%, or 99% sequence identity to SEQ ID NO: 6123).

[0585] In some embodiments, the NK cell engager comprises a heavy chain variable region (VH) comprising a heavy chain framework region 1 (VHFWR1) amino acid sequence of SEQ ID NO: 6018 (or a sequence with no more than 1, 2, 3, 4, 5, or 6 mutations, e.g., substitutions, additions, or deletions, therefrom), a VHFWR2 amino acid sequence of SEQ ID NO: 6019 (or a sequence with no more than 1, 2, 3, 4, 5, or 6 mutations, e.g., substitutions, additions, or deletions, therefrom), a VHFWR3 amino acid sequence of SEQ ID NO: 6020 (or a sequence with no more than 1, 2, 3, 4, 5, or 6 mutations, e.g., substitutions, additions, or deletions, therefrom), or a VHFWR4 amino acid sequence of SEQ ID NO: 6021 (or a sequence with no more than 1, 2, 3, 4, 5, or 6 mutations, e.g., substitutions, additions, or deletions, therefrom).

[0586] In some embodiments, the NK cell engager comprises a heavy chain variable region (VH) comprising a heavy chain framework region 1 (VHFWR1) amino acid sequence of SEQ ID NO: 6018, a VHFWR2 amino acid sequence of SEQ ID NO: 6019, a VHFWR3 amino acid sequence of SEQ ID NO: 6020, or a VHFWR4 amino acid sequence of SEQ ID NO: 6021.

[0587] In some embodiments, the NK cell engager comprises a VH comprising the amino acid sequence of SEQ ID NO: 6124 (or an amino acid sequence having at least about 75%, 80%, 85%, 90%, 95%, or 99% sequence identity to SEQ ID NO: 6124).

[0588] In some embodiments, the NK cell engager comprises a heavy chain variable region (VH) comprising a heavy chain framework region 1 (VHFWR1) amino acid sequence of SEQ ID NO: 6022 (or a sequence with no more than 1, 2, 3, 4, 5, or 6 mutations, e.g., substitutions, additions, or deletions, therefrom), a VHFWR2 amino acid sequence of SEQ ID NO: 6023 (or a sequence with no more than 1, 2, 3, 4, 5, or 6 mutations, e.g., substitutions, additions, or deletions, therefrom), a VHFWR3 amino acid sequence of SEQ ID NO: 6024 (or a sequence with no more than 1, 2, 3, 4, 5, or 6 mutations, e.g., substitutions, additions, or deletions, therefrom), or a VHFWR4 amino acid sequence of SEQ ID NO: 6025 (or a sequence with no more than 1, 2, 3, 4, 5, or 6 mutations, e.g., substitutions, additions, or deletions, therefrom). In certain embodiments, the NK cell engager comprises a heavy chain variable region (VH) comprising a heavy chain framework region 1 (VHFWR1) amino acid sequence of SEQ ID NO: 6022, a VHFWR2 amino acid sequence of SEQ ID NO: 6023, a VHFWR3 amino acid sequence of SEQ ID NO: 6024, or a VHFWR4 amino acid sequence of SEQ ID NO: 6025. In certain embodiments, the NK cell engager comprises a VH comprising the amino acid sequence of SEQ ID NO: 6125 (or an amino acid sequence having at least about 75%, 80%, 85%, 90%, 95%, or 99% sequence identity to SEQ ID NO: 6125).

[0589] In some embodiments, the NK cell engager comprises a heavy chain variable region (VH) comprising a heavy chain framework region 1 (VHFWR1) amino acid sequence of SEQ ID NO: 6026 (or a sequence with no more than 1, 2, 3, 4, 5, or 6 mutations, e.g., substitutions, additions, or deletions, therefrom), a VHFWR2 amino acid sequence of SEQ ID NO: 6027 (or a sequence with no more than 1, 2, 3, 4, 5, or 6 mutations, e.g., substitutions, additions, or deletions, therefrom), a VHFWR3 amino acid sequence of SEQ ID NO: 6028 (or a sequence with no more than 1, 2, 3, 4, 5, or 6 mutations, e.g., substitutions, additions, or deletions, therefrom), or a VHFWR4 amino acid sequence of SEQ ID NO: 6029 (or a sequence with no more than 1, 2, 3, 4, 5, or 6 mutations, e.g., substitutions, additions, or deletions, therefrom). In certain embodiments, the NK cell engager comprises a heavy chain variable region (VH) comprising a heavy chain framework region 1 (VHFWR1) amino acid sequence of SEQ ID NO: 6026, a VHFWR2 amino acid sequence of SEQ ID NO: 6027, a VHFWR3 amino acid sequence of SEQ ID NO: 6028, or a VHFWR4 amino acid sequence of SEQ ID NO: 6029. In certain embodiments, the NK cell engager comprises a VH comprising the amino acid sequence of SEQ ID NO: 6126 (or an amino acid sequence having at least about 75%, 80%, 85%, 90%, 95%, or 99% sequence identity to SEQ ID NO: 6126).

[0590] In some embodiments, the NK cell engager comprises a heavy chain variable region (VH) comprising a heavy chain framework region 1 (VHFWR1) amino acid sequence of SEQ ID NO: 6030 (or a sequence with no more than 1, 2, 3, 4, 5, or 6 mutations, e.g., substitutions, additions, or deletions, therefrom), a VHFWR2 amino acid sequence of SEQ ID NO: 6031 (or a sequence with no more than 1, 2, 3, 4, 5, or 6 mutations, e.g., substitutions, additions, or deletions, therefrom), a VHFWR3 amino acid sequence of SEQ ID NO: 6032 (or a sequence with no more than 1, 2, 3, 4, 5, or 6 mutations, e.g., substitutions, additions, or deletions, therefrom), or a VHFWR4 amino acid sequence of SEQ ID NO: 6034 (or a sequence with no more than 1, 2, 3, 4, 5, or 6 mutations, e.g., substitutions, additions, or deletions, therefrom). In certain embodiments, the NK cell engager comprises a heavy chain variable region (VH) comprising a heavy chain framework region 1 (VHFWR1) amino acid sequence of SEQ ID NO: 6030, a VHFWR2 amino acid sequence of SEQ ID NO: 6031, a VHFWR3 amino acid sequence of SEQ ID NO: 6032, or a VHFWR4 amino acid sequence of SEQ ID NO: 6034. In certain embodiments, the NK cell engager comprises a VH comprising the amino acid sequence of SEQ ID NO: 6127 (or an amino acid sequence having at least about 75%, 80%, 85%, 90%, 95%, or 99% sequence identity to SEQ ID NO: 6127).

[0591] In some embodiments, the NK cell engager comprises a heavy chain variable region (VH) comprising a heavy chain framework region 1 (VHFWR1) amino acid sequence of SEQ ID NO: 6035 (or a sequence with no more than 1, 2, 3, 4, 5, or 6 mutations, e.g., substitutions, additions, or deletions, therefrom), a VHFWR2 amino acid sequence of SEQ ID NO: 6036 (or a sequence with no more than 1, 2, 3, 4, 5, or 6 mutations, e.g., substitutions, additions, or deletions, therefrom), a VHFWR3 amino acid sequence of SEQ ID NO: 6037 (or a sequence with no more than 1, 2, 3, 4, 5, or 6 mutations, e.g., substitutions, additions, or deletions, therefrom), or a VHFWR4 amino acid sequence of SEQ ID NO: 6038 (or a sequence with no more than 1, 2, 3, 4, 5, or 6 mutations, e.g., substitutions, additions, or deletions, therefrom).

[0592] In some embodiments, the NK cell engager comprises a heavy chain variable region (VH) comprising a heavy chain framework region 1 (VHFWR1) amino acid sequence of SEQ ID NO: 6035, a VHFWR2 amino acid sequence of SEQ ID NO: 6036, a VHFWR3 amino acid sequence of SEQ ID NO: 6037, or a VHFWR4 amino acid sequence of SEQ ID NO: 6038. In certain embodiments, the NK cell engager comprises a VH comprising the amino acid sequence of SEQ ID NO: 6128 (or an amino acid sequence having at least about 75%, 80%, 85%, 90%, 95%, or 99% sequence identity to SEQ ID NO: 6128).

[0593] In some embodiments, the NK cell engager comprises a light chain variable region (VL) comprising a light chain framework region 1 (VLFWR1) amino acid sequence of SEQ ID NO: 6077 (or a sequence with no more than 1, 2, 3, 4, 5, or 6 mutations, e.g., substitutions, additions, or deletions, therefrom), a VLFWR2 amino acid sequence of SEQ ID NO: 6078 (or a sequence with no more than 1, 2, 3, 4, 5, or 6 mutations, e.g., substitutions, additions, or deletions, therefrom), a VLFWR3 amino acid sequence of SEQ ID NO: 6079 (or a sequence with no more than 1, 2, 3, 4, 5, or 6 mutations, e.g., substitutions, additions, or deletions, therefrom), or a VLFWR4 amino acid sequence of SEQ ID NO: 6080 (or a sequence with no more than 1, 2, 3, 4, 5, or 6 mutations, e.g., substitutions, additions, or deletions, therefrom). In certain embodiments, the NK cell engager comprises a light chain variable region (VL) comprising a light chain framework region 1 (VLFWR1) amino acid sequence of SEQ ID NO: 6077, a VLFWR2 amino acid sequence of SEQ ID NO: 6078, a VLFWR3 amino acid sequence of SEQ ID NO: 6079, or a VLFWR4 amino acid sequence of SEQ ID NO: 6080. In certain embodiments, the NK cell engager comprises a VL comprising the amino acid sequence of SEQ ID NO: 6137 (or an amino acid sequence having at least about 93%, 95%, or 99% sequence identity to SEQ ID NO: 6137).

[0594] In some embodiments, the NK cell engager comprises a light chain variable region (VL) comprising a light chain framework region 1 (VLFWR1) amino acid sequence of SEQ ID NO: 6081 (or a sequence with no more than 1, 2, 3, 4, 5, or 6 mutations, e.g., substitutions, additions, or deletions, therefrom), a VLFWR2 amino acid sequence of SEQ ID NO: 6082 (or a sequence with no more than 1, 2, 3, 4, 5, or 6 mutations, e.g., substitutions, additions, or deletions, therefrom), a VLFWR3 amino acid sequence of SEQ ID NO: 6083 (or a sequence with no more than 1, 2, 3, 4, 5, or 6 mutations, e.g., substitutions, additions, or deletions, therefrom), or a VLFWR4 amino acid sequence of SEQ ID NO: 6084 (or a sequence with no more than 1, 2, 3, 4, 5, or 6 mutations, e.g., substitutions, additions, or deletions, therefrom).

[0595] In some embodiments, the NK cell engager comprises a light chain variable region (VL) comprising a light chain framework region 1 (VLFWR1) amino acid sequence of SEQ ID NO: 6081, a VLFWR2 amino acid sequence of SEQ ID NO: 6082, a VLFWR3 amino acid sequence of SEQ ID NO: 6083, or a VLFWR4 amino acid sequence of SEQ ID NO: 6084. In certain embodiments, the NK cell engager comprises a VL comprising the amino acid sequence of SEQ ID NO: 6138 (or an amino acid sequence having at least about 93%, 95%, or 99% sequence identity to SEQ ID NO: 6138).

[0596] In some embodiments, the NK cell engager comprises a light chain variable region (VL) comprising a light chain framework region 1 (VLFWR1) amino acid sequence of SEQ ID NO: 6085 (or a sequence with no more than 1, 2, 3, 4, 5, or 6 mutations, e.g., substitutions, additions, or deletions, therefrom), a VLFWR2 amino acid sequence of SEQ ID NO: 6086 (or a sequence with no more than 1, 2, 3, 4, 5, or 6 mutations, e.g., substitutions, additions, or deletions, therefrom), a VLFWR3 amino acid sequence of SEQ ID NO: 6087 (or a sequence with no more than 1, 2, 3, 4, 5, or 6 mutations, e.g., substitutions, additions, or deletions, therefrom), or a VLFWR4 amino acid sequence of SEQ ID NO: 6088 (or a sequence with no more than 1, 2, 3, 4, 5, or 6 mutations, e.g., substitutions, additions, or deletions, therefrom). In certain embodiments, the NK cell engager comprises a light chain variable region (VL) comprising a light chain framework region 1 (VLFWR1) amino acid sequence of SEQ ID NO: 6085, a VLFWR2 amino acid sequence of SEQ ID NO: 6086, a VLFWR3 amino acid sequence of SEQ ID NO: 6087, or a VLFWR4 amino acid sequence of SEQ ID NO: 6088. In certain embodiments, the NK cell engager comprises a VL comprising the amino acid sequence of SEQ ID NO: 6139 (or an amino acid sequence having at least about 93%, 95%, or 99% sequence identity to SEQ ID NO: 6139).

[0597] In some embodiments, the NK cell engager comprises a light chain variable region (VL) comprising a light chain framework region 1 (VLFWR1) amino acid sequence of SEQ ID NO: 6089 (or a sequence with no more than 1, 2, 3, 4, 5, or 6 mutations, e.g., substitutions, additions, or deletions, therefrom), a VLFWR2 amino acid sequence of SEQ ID NO: 6090 (or a sequence with no more than 1, 2, 3, 4, 5, or 6 mutations, e.g., substitutions, additions, or deletions, therefrom), a VLFWR3 amino acid sequence of SEQ ID NO: 6091 (or a sequence with no more than 1, 2, 3, 4, 5, or 6 mutations, e.g., substitutions, additions, or deletions, therefrom), or a VLFWR4 amino acid sequence of SEQ ID NO: 6092 (or a sequence with no more than 1, 2, 3, 4, 5, or 6 mutations, e.g., substitutions, additions, or deletions, therefrom). In certain embodiments, the NK cell engager comprises a light chain variable region (VL) comprising a light chain framework region 1 (VLFWR1) amino acid sequence of SEQ ID NO: 6089, a VLFWR2 amino acid sequence of SEQ ID NO: 6090, a VLFWR3 amino acid sequence of SEQ ID NO: 6091, or a VLFWR4 amino acid sequence of SEQ ID NO: 6092. In certain embodiments, the NK cell engager comprises a VL comprising the amino acid sequence of SEQ ID NO: 6140 (or an amino acid sequence having at least about 93%, 95%, or 99% sequence identity to SEQ ID NO: 6140).

[0598] In some embodiments, the NK cell engager comprises a light chain variable region (VL) comprising a light chain framework region 1 (VLFWR1) amino acid sequence of SEQ ID NO: 6093 (or a sequence with no more than 1, 2, 3, 4, 5, or 6 mutations, e.g., substitutions, additions, or deletions, therefrom), a VLFWR2 amino acid sequence of SEQ ID NO: 6094 (or a sequence with no more than 1, 2, 3, 4, 5, or 6 mutations, e.g., substitutions, additions, or deletions, therefrom), a VLFWR3 amino acid sequence of SEQ ID NO: 6095 (or a sequence with no more than 1, 2, 3, 4, 5, or 6 mutations, e.g., substitutions, additions, or deletions, therefrom), or a VLFWR4 amino acid sequence of SEQ ID NO: 6096 (or a sequence with no more than 1, 2, 3, 4, 5, or 6 mutations, e.g., substitutions, additions, or deletions, therefrom). In certain embodiments, the NK cell engager comprises a light chain variable region (VL) comprising a light chain framework region 1 (VLFWR1) amino acid sequence of SEQ ID NO: 6093, a VLFWR2 amino acid sequence of SEQ ID NO: 6094, a VLFWR3 amino acid sequence of SEQ ID NO: 6095, or a VLFWR4 amino acid sequence of SEQ ID NO: 6096. In certain embodiments, the NK cell engager comprises a VL comprising the amino acid sequence of SEQ ID NO: 6141 (or an amino acid sequence having at least about 93%, 95%, or 99% sequence identity to SEQ ID NO: 6141).

[0599] In some embodiments, the NK cell engager comprises:

(i) a heavy chain variable region (VH) comprising a heavy chain complementarity determining region 1 (VHCDR1) amino acid sequence of SEQ ID NO: 6007 (or a sequence with no more than 1, 2, 3, or 4 mutations, e.g., substitutions, additions, or deletions), a VHCDR2 amino acid sequence of SEQ ID NO: 6008 (or a sequence with no more than 1, 2, 3, or 4 mutations, e.g., substitutions, additions, or deletions), and/or a VHCDR3 amino acid sequence of SEQ ID NO: 6009 (or a sequence with no more than 1, 2, 3, or 4 mutations, e.g., substitutions, additions, or deletions), and
(ii) a light chain variable region (VL) comprising a light chain complementarity determining region 1 (VLCDR1) amino acid sequence of SEQ ID NO: 6070 (or a sequence with no more than 1, 2, 3, or 4 mutations, e.g., substitutions, additions, or deletions), a VLCDR2 amino acid sequence of SEQ ID NO: 6071 (or a sequence with no more than 1, 2, 3, or 4 mutations, e.g., substitutions, additions, or deletions), and/or a VLCDR3 amino acid sequence of SEQ ID NO: 6072 (or a sequence with no more than 1, 2, 3, or 4 mutations, e.g., substitutions, additions, or deletions). In certain embodiments, the NK cell engager comprises:
(i) a heavy chain variable region (VH) comprising a heavy chain complementarity determining region 1 (VHCDR1) amino acid sequence of SEQ ID NO: 6007, a VHCDR2 amino acid sequence of SEQ ID NO: 6008, and/or a VHCDR3 amino acid sequence of SEQ ID NO: 6009, and
(ii) a light chain variable region (VL) comprising a light chain complementarity determining region 1 (VLCDR1) amino acid sequence of SEQ ID NO: 6070, a VLCDR2 amino acid sequence of SEQ ID NO: 6071, and/or a VLCDR3 amino acid sequence of SEQ ID NO: 6072.

[0600] In some embodiments, the NK cell engager comprises:

(1) a heavy chain variable region (VH) comprising a heavy chain framework region 1 (VHFWR1) amino acid sequence of SEQ ID NO: 6010 (or a sequence with no more than 1, 2, 3, 4, 5, or 6 mutations, e.g., substitutions, additions, or deletions, therefrom), a VHFWR2 amino acid sequence of SEQ ID NO: 6011 (or a sequence with no more than 1, 2, 3, 4, 5, or 6 mutations, e.g., substitutions, additions, or deletions, therefrom), a VHFWR3 amino acid sequence of SEQ ID NO: 6012 (or a sequence with no more than 1, 2, 3, 4, 5, or 6 mutations, e.g., substitutions, additions, or deletions, therefrom), or a VHFWR4 amino acid sequence of SEQ ID NO: 6013 (or a sequence with no more than 1, 2, 3, 4, 5, or 6 mutations, e.g., substitutions, additions, or deletions, therefrom), and/or
(2) a light chain variable region (VL) comprising a light chain framework region 1 (VLFWR1) amino acid sequence of SEQ ID NO: 6073 (or a sequence with no more than 1, 2, 3, 4, 5, or 6 mutations, e.g., substitutions, additions, or deletions, therefrom), a VLFWR2 amino acid sequence of SEQ ID NO: 6074 (or a sequence with no more than 1, 2, 3, 4, 5, or 6 mutations, e.g., substitutions, additions, or deletions, therefrom), a VLFWR3 amino acid sequence of SEQ ID NO: 6075 (or a sequence with no more than 1, 2, 3, 4, 5, or 6 mutations, e.g., substitutions, additions, or deletions, therefrom), or a VLFWR4 amino acid sequence of SEQ ID NO: 6076 (or a sequence with no more than 1, 2, 3, 4, 5, or 6 mutations, e.g., substitutions, additions, or deletions, therefrom). In certain embodiments, the NK cell engager comprises:
(1) a heavy chain variable region (VH) comprising a heavy chain framework region 1 (VHFWR1) amino acid sequence of SEQ ID NO: 6010, a VHFWR2 amino acid sequence of SEQ ID NO: 6011, a VHFWR3 amino acid sequence of SEQ ID NO: 6012, or a VHFWR4 amino acid sequence of SEQ ID NO: 6013, and (3) a light chain variable region (VL) comprising a light chain framework region 1 (VLFWR1) amino acid sequence of SEQ ID NO: 6073, a VLFWR2 amino acid sequence of SEQ ID NO: 6074, a VLFWR3 amino acid sequence of SEQ ID NO: 6075, or a VLFWR4 amino acid sequence of SEQ ID NO: 6076.

[0601] In some embodiments, the NK cell engager comprises:

(i) a VH comprising the amino acid sequence of SEQ ID NO: 6122 (or an amino acid sequence having at least about 75%, 80%, 85%, 90%, 95%, or 99% sequence identity to SEQ ID NO: 6122), and/or
(ii) a VL comprising the amino acid sequence of SEQ ID NO: 6136 (or an amino acid sequence having at least about 93%, 95%, or 99% sequence identity to SEQ ID NO: 6136).

[0602] In some embodiments, the NK cell engager comprises a heavy chain comprising the amino acid sequence of SEQ ID NOs: 6151 or 6152 (or an amino acid sequence having at least about 75%, 80%, 85%, 90%, 95%, or 99% sequence identity to SEQ ID NOs: 6151 or 6152).

[0603] In some embodiments, the NK cell engager comprises a light chain comprising the amino acid sequence of SEQ ID NO: 6153 (or an amino acid sequence having at least about 75%, 80%, 85%, 90%, 95%, or 99% sequence identity to SEQ ID NO: 6153).

[0604] In some embodiments, the NK cell engager comprises a heavy chain comprising the amino acid sequence of SEQ ID NOs: 6151 or 6152 (or an amino acid sequence having at least about 75%, 80%, 85%, 90%, 95%, or 99% sequence identity to SEQ ID NOs: 6151 or 6152), and a light chain comprising the amino acid sequence of SEQ ID NO: 6153 (or an amino acid sequence having at least about 75%, 80%, 85%, 90%, 95%, or 99% sequence identity to SEQ ID NO: 6153).

[0605] In some embodiments, the NK cell engager comprises a heavy chain variable region (VH) comprising a heavy chain framework region 1 (VHFWR1) amino acid sequence of SEQ ID NO: 6039 (or a sequence with no more than 1, 2, 3, 4, 5, or 6 mutations, e.g., substitutions, additions, or deletions, therefrom), a VHFWR2 amino acid sequence of SEQ ID NO: 6040 (or a sequence with no more than 1, 2, 3, 4, 5, or 6 mutations, e.g., substitutions, additions, or deletions, therefrom), a VHFWR3 amino acid sequence of SEQ ID NO: 6041 (or a sequence with no more than 1, 2, 3, 4, 5, or 6 mutations, e.g., substitutions, additions, or deletions, therefrom), or a VHFWR4 amino acid sequence of SEQ ID NO: 6042 (or a sequence with no more than 1, 2, 3, 4, 5, or 6 mutations, e.g., substitutions, additions, or deletions, therefrom).

[0606] In some embodiments, the NK cell engager comprises a heavy chain variable region (VH) comprising a heavy chain framework region 1 (VHFWR1) amino acid sequence of SEQ ID NO: 6039, a VHFWR2 amino acid sequence of SEQ ID NO: 6040, a VHFWR3 amino acid sequence of SEQ ID NO: 6041, or a VHFWR4 amino acid sequence of SEQ ID NO: 6042. In certain embodiments, the NK cell engager comprises a VH comprising the amino acid sequence of SEQ ID NO: 6129 (or an amino acid sequence having at least about 75%, 80%, 85%, 90%, 95%, or 99% sequence identity to SEQ ID NO: 6129).

[0607] In some embodiments, the NK cell engager comprises a heavy chain variable region (VH) comprising a heavy chain framework region 1 (VHFWR1) amino acid sequence of SEQ ID NO: 6043 (or a sequence with no more than 1, 2, 3, 4, 5, or 6 mutations, e.g., substitutions, additions, or deletions, therefrom), a VHFWR2 amino acid sequence of SEQ ID NO: 6044 (or a sequence with no more than 1, 2, 3, 4, 5, or 6 mutations, e.g., substitutions, additions, or deletions, therefrom), a VHFWR3 amino acid sequence of SEQ ID NO: 6045 (or a sequence with no more than 1, 2, 3, 4, 5, or 6 mutations, e.g., substitutions, additions, or deletions, therefrom), or a VHFWR4 amino acid sequence of SEQ ID NO: 6046 (or a sequence with no more than 1, 2, 3, 4, 5, or 6 mutations, e.g., substitutions, additions, or deletions, therefrom).

[0608] In some embodiments, the NK cell engager comprises a heavy chain variable region (VH) comprising a heavy chain framework region 1 (VHFWR1) amino acid sequence of SEQ ID NO: 6043, a VHFWR2 amino acid sequence of SEQ ID NO: 6044, a VHFWR3 amino acid sequence of SEQ ID NO: 6045, or a VHFWR4 amino acid sequence of SEQ ID NO: 6046.

[0609] In some embodiments, the NK cell engager comprises a VH comprising the amino acid sequence of SEQ ID NO: 6130 (or an amino acid sequence having at least about 75%, 80%, 85%, 90%, 95%, or 99% sequence identity to SEQ ID NO: 6130).

[0610] In some embodiments, the NK cell engager comprises a heavy chain variable region (VH) comprising a heavy chain framework region 1 (VHFWR1) amino acid sequence of SEQ ID NO: 6047 (or a sequence with no more than 1, 2, 3, 4, 5, or 6 mutations, e.g., substitutions, additions, or deletions, therefrom), a VHFWR2 amino acid sequence of SEQ ID NO: 6048 (or a sequence with no more than 1, 2, 3, 4, 5, or 6 mutations, e.g., substitutions, additions, or deletions, therefrom), a VHFWR3 amino acid sequence of SEQ ID NO: 6049 (or a sequence with no more than 1, 2, 3, 4, 5, or 6 mutations, e.g., substitutions, additions, or deletions, therefrom), or a VHFWR4 amino acid sequence of SEQ ID NO: 6050 (or a sequence with no more than 1, 2, 3, 4, 5, or 6 mutations, e.g., substitutions, additions, or deletions, therefrom). In certain embodiments, the NK cell engager comprises a heavy chain variable region (VH) comprising a heavy chain framework region 1 (VHFWR1) amino acid sequence of SEQ ID NO: 6047, a VHFWR2 amino acid sequence of SEQ ID NO: 6048, a VHFWR3 amino acid sequence of SEQ ID NO: 6049, or a VHFWR4 amino acid sequence of SEQ ID NO: 6050. In certain embodiments, the NK cell engager comprises a VH comprising the amino acid sequence of SEQ ID NO: 6131 (or an amino acid sequence having at least about 75%, 80%, 85%, 90%, 95%, or 99% sequence identity to SEQ ID NO: 6131).

[0611] In some embodiments, the NK cell engager comprises a heavy chain variable region (VH) comprising a heavy chain framework region 1 (VHFWR1) amino acid sequence of SEQ ID NO: 6051 (or a sequence with no more than 1, 2, 3, 4, 5, or 6 mutations, e.g., substitutions, additions, or deletions, therefrom), a VHFWR2 amino acid sequence of SEQ ID NO: 6052 (or a sequence with no more than 1, 2, 3, 4, 5, or 6 mutations, e.g., substitutions, additions, or deletions, therefrom), a VHFWR3 amino acid sequence of SEQ ID NO: 6053 (or a sequence with no more than 1, 2, 3, 4, 5, or 6 mutations, e.g., substitutions, additions, or deletions, therefrom), or a VHFWR4 amino acid sequence of SEQ ID NO: 6054 (or a sequence with no more than 1, 2, 3, 4, 5, or 6 mutations, e.g., substitutions, additions, or deletions, therefrom). In certain embodiments, the NK cell engager comprises a heavy chain variable region (VH) comprising a heavy chain framework region 1 (VHFWR1) amino acid sequence of SEQ ID NO: 6051, a VHFWR2 amino acid sequence of SEQ ID NO: 6052, a VHFWR3 amino acid sequence of SEQ ID NO: 6053, or a VHFWR4 amino acid sequence of SEQ ID NO: 6054. In certain embodiments, the NK cell engager comprises a VH comprising the amino acid sequence of SEQ ID NO: 6132 (or an amino acid sequence having at least about 75%, 80%, 85%, 90%, 95%, or 99% sequence identity to SEQ ID NO: 6132).

[0612] In some embodiments, the NK cell engager comprises a heavy chain variable region (VH) comprising a heavy chain framework region 1 (VHFWR1) amino acid sequence of SEQ ID NO: 6055 (or a sequence with no more than 1, 2, 3, 4, 5, or 6 mutations, e.g., substitutions, additions, or deletions, therefrom), a VHFWR2 amino acid sequence of SEQ ID NO: 6056 (or a sequence with no more than 1, 2, 3, 4, 5, or 6 mutations, e.g., substitutions, additions, or deletions, therefrom), a VHFWR3 amino acid sequence of SEQ ID NO: 6057 (or a sequence with no more than 1, 2, 3, 4, 5, or 6 mutations, e.g., substitutions, additions, or deletions, therefrom), or a VHFWR4 amino acid sequence of SEQ ID NO: 6058 (or a sequence with no more than 1, 2, 3, 4, 5, or 6 mutations, e.g., substitutions, additions, or deletions, therefrom). In certain embodiments, the NK cell engager comprises a heavy chain variable region (VH) comprising a heavy chain framework region 1 (VHFWR1) amino acid sequence of SEQ ID NO: 6055, a VHFWR2 amino acid sequence of SEQ ID NO: 6056, a VHFWR3 amino acid sequence of SEQ ID NO: 6057, or a VHFWR4 amino acid sequence of SEQ ID NO: 6058. In certain embodiments, the NK cell engager comprises a VH comprising the amino acid sequence of SEQ ID NO: 6133 (or an amino acid sequence having at least about 75%, 80%, 85%, 90%, 95%, or 99% sequence identity to SEQ ID NO: 6133).

[0613] In some embodiments, the NK cell engager comprises a heavy chain variable region (VH) comprising a heavy chain framework region 1 (VHFWR1) amino acid sequence of SEQ ID NO: 6059 (or a sequence with no more than 1, 2, 3, 4, 5, or 6 mutations, e.g., substitutions, additions, or deletions, therefrom), a VHFWR2 amino acid sequence of SEQ ID NO: 6060 (or a sequence with no more than 1, 2, 3, 4, 5, or 6 mutations, e.g., substitutions, additions, or deletions, therefrom), a VHFWR3 amino acid sequence of SEQ ID NO: 6061 (or a sequence with no more than 1, 2, 3, 4, 5, or 6 mutations, e.g., substitutions, additions, or deletions, therefrom), or a VHFWR4 amino acid sequence of SEQ ID NO: 6062 (or a sequence with no more than 1, 2, 3, 4, 5, or 6 mutations, e.g., substitutions, additions, or deletions, therefrom). In certain embodiments, the NK cell engager comprises a heavy chain variable region (VH) comprising a heavy chain framework region 1 (VHFWR1) amino acid sequence of SEQ ID NO: 6059, a VHFWR2 amino acid sequence of SEQ ID NO: 6060, a VHFWR3 amino acid sequence of SEQ ID NO: 6061, or a VHFWR4 amino acid sequence of SEQ ID NO: 6062. In certain embodiments, the NK cell engager comprises a VH comprising the amino acid sequence of SEQ ID NO: 6134 (or an amino acid sequence having at least about 75%, 80%, 85%, 90%, 95%, or 99% sequence identity to SEQ ID NO: 6134).

[0614] In some embodiments, wherein the NK cell engager comprises a light chain variable region (VL) comprising a light chain framework region 1 (VLFWR1) amino acid sequence of SEQ ID NO: 6097 (or a sequence with no more than 1, 2, 3, 4, 5, or 6 mutations, e.g., substitutions, additions, or deletions, therefrom), a VLFWR2 amino acid sequence of SEQ ID NO: 6098 (or a sequence with no more than 1, 2, 3, 4, 5, or 6 mutations, e.g., substitutions, additions, or deletions, therefrom), a VLFWR3 amino acid sequence of SEQ ID NO: 6099 (or a sequence with no more than 1, 2, 3, 4, 5, or 6 mutations, e.g., substitutions, additions, or deletions, therefrom), or a VLFWR4 amino acid sequence of SEQ ID NO: 6100 (or a sequence with no more than 1, 2, 3, 4, 5, or 6 mutations, e.g., substitutions, additions, or deletions, therefrom). In certain embodiments, the NK cell engager comprises a light chain variable region (VL) comprising a light chain framework region 1 (VLFWR1) amino acid sequence of SEQ ID NO: 6097, a VLFWR2 amino acid sequence of SEQ ID NO: 6098, a VLFWR3 amino acid sequence of SEQ ID NO: 6099, or a VLFWR4 amino acid sequence of SEQ ID NO: 6100. In certain embodiments, wherein the NK cell engager comprises a VL comprising the amino acid sequence of SEQ ID NO: 6142 (or an amino acid sequence having at least about 93%, 95%, or 99% sequence identity to SEQ ID NO: 6142).

[0615] In some embodiments, the NK cell engager comprises a light chain variable region (VL) comprising a light chain framework region 1 (VLFWR1) amino acid sequence of SEQ ID NO: 6101 (or a sequence with no more than 1, 2, 3, 4, 5, or 6 mutations, e.g., substitutions, additions, or deletions, therefrom), a VLFWR2 amino acid sequence of SEQ ID NO: 6102 (or a sequence with no more than 1, 2, 3, 4, 5, or 6 mutations, e.g., substitutions, additions, or deletions, therefrom), a VLFWR3 amino acid sequence of SEQ ID NO: 6103 (or a sequence with no more than 1, 2, 3, 4, 5, or 6 mutations, e.g., substitutions, additions, or deletions, therefrom), or a VLFWR4 amino acid sequence of SEQ ID NO: 6104 (or a sequence with no more than 1, 2, 3, 4, 5, or 6 mutations, e.g., substitutions, additions, or deletions, therefrom). In certain embodiments, the NK cell engager comprises a light chain variable region (VL) comprising a light chain framework region 1 (VLFWR1) amino acid sequence of SEQ ID NO: 6101, a VLFWR2 amino acid sequence of SEQ ID NO: 6102, a VLFWR3 amino acid sequence of SEQ ID NO: 6103, or a VLFWR4 amino acid sequence of SEQ ID NO: 6104. In certain embodiments, the NK cell engager comprises a VL comprising the amino acid sequence of SEQ ID NO: 6143 (or an amino acid sequence having at least about 93%, 95%, or 99% sequence identity to SEQ ID NO: 6143).

[0616] In some embodiments, the NK cell engager comprises a light chain variable region (VL) comprising a light chain framework region 1 (VLFWR1) amino acid sequence of SEQ ID NO: 6105 (or a sequence with no more than 1, 2, 3, 4, 5, or 6 mutations, e.g., substitutions, additions, or deletions, therefrom), a VLFWR2 amino acid sequence of SEQ ID NO: 6106 (or a sequence with no more than 1, 2, 3, 4, 5, or 6 mutations, e.g., substitutions, additions, or deletions, therefrom), a VLFWR3 amino acid sequence of SEQ ID NO: 6107 (or a sequence with no more than 1, 2, 3, 4, 5, or 6 mutations, e.g., substitutions, additions, or deletions, therefrom), or a VLFWR4 amino acid sequence of SEQ ID NO: 6108 (or a sequence with no more than 1, 2, 3, 4, 5, or 6 mutations, e.g., substitutions, additions, or deletions, therefrom). In certain embodiments, the NK cell engager comprises a light chain variable region (VL) comprising a light chain framework region 1 (VLFWR1) amino acid sequence of SEQ ID NO: 6105, a VLFWR2 amino acid sequence of SEQ ID NO: 6106, a VLFWR3 amino acid sequence of SEQ ID NO: 6107, or a VLFWR4 amino acid sequence of SEQ ID NO: 6108. In certain embodiments, the NK cell engager comprises a VL comprising the amino acid sequence of SEQ ID NO: 6144 (or an amino acid sequence having at least about 93%, 95%, or 99% sequence identity to SEQ ID NO: 6144).

[0617] In some embodiments, the NK cell engager comprises a light chain variable region (VL) comprising a light chain framework region 1 (VLFWR1) amino acid sequence of SEQ ID NO: 6109 (or a sequence with no more than 1, 2, 3, 4, 5, or 6 mutations, e.g., substitutions, additions, or deletions, therefrom), a VLFWR2 amino acid sequence of SEQ ID NO: 6110 (or a sequence with no more than 1, 2, 3, 4, 5, or 6 mutations, e.g., substitutions, additions, or deletions, therefrom), a VLFWR3 amino acid sequence of SEQ ID NO: 6111 (or a sequence with no more than 1, 2, 3, 4, 5, or 6 mutations, e.g., substitutions, additions, or deletions, therefrom), or a VLFWR4 amino acid sequence of SEQ ID NO: 6112 (or a sequence with no more than 1, 2, 3, 4, 5, or 6 mutations, e.g., substitutions, additions, or deletions, therefrom). In certain embodiments, the NK cell engager comprises a light chain variable region (VL) comprising a light chain framework region 1 (VLFWR1) amino acid sequence of SEQ ID NO: 6109, a VLFWR2 amino acid sequence of SEQ ID NO: 6110, a VLFWR3 amino acid sequence of SEQ ID NO: 6111, or a VLFWR4 amino acid sequence of SEQ ID NO: 6112. In certain embodiments, the NK cell engager comprises a VL comprising the amino acid sequence of SEQ ID NO: 6145 (or an amino acid sequence having at least about 93%, 95%, or 99% sequence identity to SEQ ID NO: 6145).

[0618] In some embodiments, the NK cell engager comprises a light chain variable region (VL) comprising a light chain framework region 1 (VLFWR1) amino acid sequence of SEQ ID NO: 6113 (or a sequence with no more than 1, 2, 3, 4, 5, or 6 mutations, e.g., substitutions, additions, or deletions, therefrom), a VLFWR2 amino acid sequence of SEQ ID NO: 6114 (or a sequence with no more than 1, 2, 3, 4, 5, or 6 mutations, e.g., substitutions, additions, or deletions, therefrom), a VLFWR3 amino acid sequence of SEQ ID NO: 6115 (or a sequence with no more than 1, 2, 3, 4, 5, or 6 mutations, e.g., substitutions, additions, or deletions, therefrom), or a VLFWR4 amino acid sequence of SEQ ID NO: 6116 (or a sequence with no more than 1, 2, 3, 4, 5, or 6 mutations, e.g., substitutions, additions, or deletions, therefrom). In certain embodiments, the NK cell engager comprises a light chain variable region (VL) comprising a light chain framework region 1 (VLFWR1) amino acid sequence of SEQ ID NO: 6113, a VLFWR2 amino acid sequence of SEQ ID NO: 6114, a VLFWR3 amino acid sequence of SEQ ID NO: 6115, or a VLFWR4 amino acid sequence of SEQ ID NO: 6116. In certain embodiments, the NK cell engager comprises a VL comprising the amino acid sequence of SEQ ID NO: 6146 (or an amino acid sequence having at least about 93%, 95%, or 99% sequence identity to SEQ ID NO: 6146).

[0619] In some embodiments, the NK cell engager comprises a light chain variable region (VL) comprising a light chain framework region 1 (VLFWR1) amino acid sequence of SEQ ID NO: 6117 (or a sequence with no more than 1, 2, 3, 4, 5, or 6 mutations, e.g., substitutions, additions, or deletions, therefrom), a VLFWR2 amino acid sequence of SEQ ID NO: 6118 (or a sequence with no more than 1, 2, 3, 4, 5, or 6 mutations, e.g., substitutions, additions, or deletions, therefrom), a VLFWR3 amino acid sequence of SEQ ID NO: 6119 (or a sequence with no more than 1, 2, 3, 4, 5, or 6 mutations, e.g., substitutions, additions, or deletions, therefrom), or a VLFWR4 amino acid sequence of SEQ ID NO: 6120 (or a sequence with no more than 1, 2, 3, 4, 5, or 6 mutations, e.g., substitutions, additions, or deletions, therefrom). In certain embodiments, the NK cell engager comprises a light chain variable region (VL) comprising a light chain framework region 1 (VLFWR1) amino acid sequence of SEQ ID NO: 6117, a VLFWR2 amino acid sequence of SEQ ID NO: 6118, a VLFWR3 amino acid sequence of SEQ ID NO: 6119, or a VLFWR4 amino acid sequence of SEQ ID NO: 6120. In certain embodiments, the NK cell engager comprises a VL comprising the amino acid sequence of SEQ ID NO: 6147 (or an amino acid sequence having at least about 93%, 95%, or 99% sequence identity to SEQ ID NO: 6147).

[0620] In some embodiments, the NK cell engager is an antibody molecule, e.g., an antigen binding domain, that binds to NKp46. In certain embodiments, lysis of the lymphoma cell is mediated by NKp46. In some embodiments, the multifunctional molecule does not activate the NK cell when incubated with the NK cell in the absence of the tumor antigen on the lymphoma cell. In some embodiments, the multifunctional molecule activates the NK cell when the NK cell is a NKp46 expressing NK cell and the tumor antigen on the lymphoma cell is also present. In some embodiments, the multifunctional molecule does not activate the NK cell when the NK cell is not a NKp46 expressing NK cell and the tumor antigen on the lymphoma cell is also present. In some embodiments, the NK cell engager comprises a VH comprising the amino acid sequence of SEQ ID NO: 6182 (or an amino acid sequence having at least about 75%, 80%, 85%, 90%, 95%, or 99% sequence identity to SEQ ID NO: 6182). In some embodiments, the NK cell engager comprises a VL comprising the amino acid sequence of SEQ ID NO: 6183 (or an amino acid sequence having at least about 93%, 95%, or 99% sequence identity to SEQ ID NO: 6183). In some embodiments, the NK cell engager comprises an scFV comprising the amino acid sequence of SEQ ID NO: 6181 (or an amino acid sequence having at least about 93%, 95%, or 99% sequence identity to SEQ ID NO: 6181).

[0621] In some embodiments, the NK cell engager is an antibody molecule, e.g., an antigen binding domain, that binds to NKG2D. In certain embodiments, lysis of the lymphoma cell is mediated by NKG2D. In some embodiments, the multifunctional molecule does not activate the NK cell when incubated with the NK cell in the absence of the tumor antigen on the lymphoma cell. In some embodiments, the multifunctional molecule activates the NK cell when the NK cell is a NKG2D expressing NK cell and the tumor antigen on the lymphoma cell is also present. In some embodiments, the multifunctional molecule does not activate the NK cell when the NK cell is not a NKG2D expressing NK cell and the tumor antigen on the lymphoma cell is also present. In some embodiments, the NK cell engager comprises a VH comprising the amino acid sequence of SEQ ID NO: 6176 (or an amino acid sequence having at least about 75%, 80%, 85%, 90%, 95%, or 99% sequence identity to SEQ ID NO: 6176). In some embodiments, the NK cell engager comprises a VL comprising the amino acid sequence of SEQ ID NO: 6177 (or an amino acid sequence having at least about 93%, 95%, or 99% sequence identity to SEQ ID NO: 6177). In some embodiments, the NK cell engager comprises an scFV comprising the amino acid sequence of SEQ ID NO: 6175 (or an amino acid sequence having at least about 93%, 95%, or 99% sequence identity to SEQ ID NO: 6175). In some embodiments, the NK cell engager comprises a VH comprising the amino acid sequence of SEQ ID NO: 6179 (or an amino acid sequence having at least about 75%, 80%, 85%, 90%, 95%, or 99% sequence identity to SEQ ID NO: 6179). In some embodiments, the NK cell engager comprises a VL comprising the amino acid sequence of SEQ ID NO: 6180 (or an amino acid sequence having at least about 93%, 95%, or 99% sequence identity to SEQ ID NO: 6180). In some embodiments, the NK cell engager comprises an scFV comprising the amino acid sequence of SEQ ID NO: 6178 (or an amino acid sequence having at least about 93%, 95%, or 99% sequence identity to SEQ ID NO: 6178).

[0622] In some embodiments, the NK cell engager is an antibody molecule, e.g., an antigen binding domain, that binds to CD16. In some embodiments, lysis of the lymphoma cell is mediated by CD16. In some embodiments, the multifunctional molecule does not activate the NK cell when incubated with the NK cell in the absence of the tumor antigen on the lymphoma cell. In some embodiments, the multifunctional molecule activates the NK cell when the NK cell is a CD16 expressing NK cell and the tumor antigen on the lymphoma cell is also present. In some embodiments, the multifunctional molecule does not activate the NK cell when the NK cell is not a CD16 expressing NK cell and the tumor antigen on the lymphoma cell is also present. In some embodiments, the NK cell engager comprises a VH comprising the amino acid sequence of SEQ ID NO: 6185 (or an amino acid sequence having at least about 75%, 80%, 85%, 90%, 95%, or 99% sequence identity to SEQ ID NO: 6185). In some embodiments, the NK cell engager comprises a VL comprising the amino acid sequence of SEQ ID NO: 6186 (or an amino acid sequence having at least about 93%, 95%, or 99% sequence identity to SEQ ID NO: 6186). In some embodiments, the NK cell engager comprises an scFv comprising the amino acid sequence of SEQ ID NO: 6184 (or an amino acid sequence having at least about 93%, 95%, or 99% sequence identity to SEQ ID NO: 6184).

[0623] In some embodiments, the NK cell engager is a ligand, optionally, the ligand further comprises an immunoglobulin constant region, e.g., an Fc region. In certain embodiments, the NK cell engager is a ligand of NKp44 or NKp46, e.g., a viral HA. In certain embodiments, the NK cell engager is a ligand of DAP10, e.g., a coreceptor for NKG2D. In certain embodiments, the NK cell engager is a ligand of CD16, e.g., a CD16a/b ligand, e.g., a CD16a/b ligand further comprising an antibody Fc region.

### B Cell, Macrophage & Dendritic Cell Engagers

[0624] Broadly, B cells, also known as B lymphocytes, are a type of white blood cell of the lymphocyte subtype. They function in the humoral immunity component of the adaptive immune system by secreting antibodies. Additionally, B cells present antigen (they are also classified as professional antigen-presenting cells (APCs)) and secrete cytokines. Macrophages are a type of white blood cell that engulfs and digests cellular debris, foreign substances, microbes, cancer cells via phagocytosis. Besides phagocytosis, they play important roles in nonspecific defense (innate immunity) and also help initiate specific defense mechanisms (adaptive immunity) by recruiting other immune cells such as lymphocytes. For example, they are important as antigen presenters to T cells. Beyond increasing inflammation and stimulating the immune system, macrophages also play an important anti-inflammatory role and can decrease immune reactions through the release of cytokines. Dendritic cells (DCs) are antigen-presenting cells that function in processing antigen material and present it on the cell surface to the T cells of the immune system.

[0625] The present disclosure provides, inter alia, multispecific (e.g., bi-, tri-, quad-specific) or multifunctional molecules, that include, e.g., are engineered to contain, one or more B cell, macrophage, and/or dendritic cell engager that mediate binding to and/or activation of a B cell, macrophage, and/or dendritic cell.

[0626] Accordingly, in some embodiments, the immune cell engager comprises a B cell, macrophage, and/or dendritic cell engager chosen from one or more of CD40 ligand (CD40L) or a CD70 ligand; an antibody molecule that binds to CD40 or CD70; an antibody molecule to OX40; an OX40 ligand (OX40L); an agonist of a Toll-like receptor (e.g., as described herein, e.g., a TLR4, e.g., a constitutively active TLR4 (caTLR4), or a TLR9 agonists); a 41BB; a CD2; a CD47; or a STING agonist, or a combination thereof.

[0627] In some embodiments, the B cell engager is a CD40L, an OX40L, or a CD70 ligand, or an antibody molecule that binds to OX40, CD40 or CD70.

[0628] In some embodiments, the macrophage engager is a CD2 agonist. In some embodiments, the macrophage engager is an antigen binding domain that binds to: CD40L or antigen binding domain or ligand that binds CD40, a Toll like receptor (TLR) agonist (e.g., as described herein), e.g., a TLR9 or TLR4 (e.g., caTLR4 (constitutively active TLR4), CD47, or a STING agonist. In some embodiments, the STING agonist is a cyclic dinucleotide, e.g., cyclic di-GMP (cdGMP) or cyclic di-AMP (cdAMP). In some embodiments, the STING agonist is biotinylated.

[0629] In some embodiments, the dendritic cell engager is a CD2 agonist. In some embodiments, the dendritic cell engager is a ligand, a receptor agonist, or an antibody molecule that binds to one or more of: OX40L, 41BB, a TLR agonist (e.g., as described herein) (e.g., TLR9 agonist, TLR4 (e.g., caTLR4 (constitutively active TLR4)), CD47, or and a STING agonist. In some embodiments, the STING agonist is a cyclic dinucleotide, e.g., cyclic di-GMP (cdGMP) or cyclic di-AMP (cdAMP). In some embodiments, the STING agonist is biotinylated.

[0630] In other embodiments, the immune cell engager mediates binding to, or activation of, one or more of a B cell, a macrophage, and/or a dendritic cell. Exemplary B cell, macrophage, and/or dendritic cell engagers can be chosen from one or more of CD40 ligand (CD40L) or a CD70 ligand; an antibody molecule that binds to CD40 or CD70; an antibody molecule to OX40; an OX40 ligand (OX40L); a Toll-like receptor agonist (e.g., a TLR4, e.g., a constitutively active TLR4 (caTLR4) or a TLR9 agonist); a 41BB agonist; a CD2; a CD47; or a STING agonist, or a combination thereof.

[0631] In some embodiments, the B cell engager is chosen from one or more of a CD40L, an OX40L, or a CD70 ligand, or an antibody molecule that binds to OX40, CD40 or CD70.

[0632] In other embodiments, the macrophage cell engager is chosen from one or more of a CD2 agonist; a CD40L; an OX40L; an antibody molecule that binds to OX40, CD40 or CD70; a Toll-like receptor agonist or a fragment thereof (e.g., a TLR4, e.g., a constitutively active TLR4 (caTLR4)); a CD47 agonist; or a STING agonist.

[0633] In other embodiments, the dendritic cell engager is chosen from one or more of a CD2 agonist, an OX40 antibody, an OX40L, 41BB agonist, a Toll-like receptor agonist or a fragment thereof (e.g., a TLR4, e.g., a constitutively active TLR4 (caTLR4)), CD47 agonist, or a STING agonist.

[0634] In one embodiment, the OX40L comprises the amino acid sequence: QVSHRYPRIQSIKVQFTEYKKEKGFILTSQKEDEIMKVQNNSVIINCDGFYLISLKGYFSQEVNISLHY QKDEEPLFQLKKVRSVNSLMVASLTYKDKVYLNVTTDNTSLDDFHVNGGELILIHQNPGEFCVL (SEQ ID NO: 36), a fragment thereof, or an amino acid sequence substantially identical thereto (e.g., 95% to 99.9% identical thereto, or having at least one amino acid alteration, but not more than five, ten or fifteen alterations (e.g., substitutions, deletions, or insertions, e.g., conservative substitutions) to the amino acid sequence of SEQ ID NO: 36.

[0635] In another embodiment, the CD40L comprises the amino acid sequence: MQKGDQNPQIAAHVISEASSKTTSVLQWAEKGYYTMSNNLVTLENGKQLTVKRQGLYYIYAQVTF CSNREASSQAPFIASLCLKSPGRFERILLRAANTHSSAKPCGQQSIHLGGVFELQPGASVFVNVTDPS QVSHGTGFTSFGLLKL (SEQ ID NO: 37), a fragment thereof, or an amino acid sequence substantially identical thereto (e.g., 95% to 99.9% identical thereto, or having at least one amino acid alteration, but not more than five, ten or fifteen alterations (e.g., substitutions, deletions, or insertions, e.g., conservative substitutions) to the amino acid sequence of SEQ ID NO: 37.

[0636] In yet other embodiments, the STING agonist comprises a cyclic dinucleotide, e.g., a cyclic di-GMP (cdGMP), a cyclic di-AMP (cdAMP), or a combination thereof, optionally with 2′,5′ or 3′,5′ phosphate linkages.

[0637] In one embodiment, the immune cell engager includes 41BB ligand, e.g., comprising the amino acid sequence: ACPWAVSGARASPGSAASPRLREGPELSPDDPAGLLDLRQGMFAQLVAQNVLLIDGPLSWYSDPGL AGVSLTGGLSYKEDTKELVVAKAGVYYVFFQLELRRVVAGEGSGSVSLALHLQPLRSAAGAAALA LTVDLPPASSEARNSAFGFQGRLLHLSAGQRLGVHLHTEARARHAWQLTQGATVLGLFRVTPEIPA GLPSPRSE (SEQ ID NO: 38), a fragment thereof, or an amino acid sequence substantially identical thereto (e.g., 95% to 99.9% identical thereto, or having at least one amino acid alteration, but not more than five, ten or fifteen alterations (e.g., substitutions, deletions, or insertions, e.g., conservative substitutions) to the amino acid sequence of SEQ ID NO: 38.

### Toll-Like Receptors

[0638] Toll-Like Receptors (TLRs) are evolutionarily conserved receptors are homologues of the Drosophila Toll protein, and recognize highly conserved structural motifs known as pathogen-associated microbial patterns (PAMPs), which are exclusively expressed by microbial pathogens, or danger-associated molecular patterns (DAMPs) that are endogenous molecules released from necrotic or dying cells. PAMPs include various bacterial cell wall components such as lipopolysaccharide (LPS), peptidoglycan (PGN) and lipopeptides, as well as flagellin, bacterial DNA and viral double-stranded RNA. DAMPs include intracellular proteins such as heat shock proteins as well as protein fragments from the extracellular matrix. Stimulation of TLRs by the corresponding PAMPs or DAMPs initiates signaling cascades leading to the activation of transcription factors, such as AP-1, NF-κB and interferon regulatory factors (IRFs). Signaling by TLRs results in a variety of cellular responses, including the production of interferons (IFNs), pro-inflammatory cytokines and effector cytokines that direct the adaptive immune response. TLRs are implicated in a number of inflammatory and immune disorders and play a role in cancer (Rakoff-Nahoum S. & Medzhitov R., 2009. Toll-like receptors and cancer. Nat Revs Cancer 9:57-63.)

[0639] TLRs are type I transmembrane proteins characterized by an extracellular domain containing leucine-rich repeats (LRRs) and a cytoplasmic tail that contains a conserved region called the Toll/IL-1 receptor (TIR) domain. Ten human and twelve murine TLRs have been characterized, TLR1 to TLR10 in humans, and TLR1 to TLR9, TLR11, TLR12 and TLR13 in mice, the homolog of TLR10 being a pseudogene. TLR2 is essential for the recognition of a variety of PAMPs from Gram-positive bacteria, including bacterial lipoproteins, lipomannans and lipoteichoic acids. TLR3 is implicated in virus-derived double-stranded RNA. TLR4 is predominantly activated by lipopolysaccharide. TLR5 detects bacterial flagellin and TLR9 is required for response to unmethylated CpG DNA. Finally, TLR7 and TLR8 recognize small synthetic antiviral molecules, and single-stranded RNA was reported to be their natural ligand. TLR11 has been reported to recognize uropathogenic E. coli and a profilin-like protein from Toxoplasma gondii. The repertoire of specificities of the TLRs is apparently extended by the ability of TLRs to heterodimerize with one another. For example, dimers of TLR2 and TLR6 are required for responses to diacylated lipoproteins while TLR2 and TLR1 interact to recognize triacylated lipoproteins. Specificities of the TLRs are also influenced by various adapter and accessory molecules, such as MD-2 and CD14 that form a complex with TLR4 in response to LPS.

[0640] TLR signaling consists of at least two distinct pathways: a MyD88-dependent pathway that leads to the production of inflammatory cytokines, and a MyD88-independent pathway associated with the stimulation of IFN-β and the maturation of dendritic cells. The MyD88-dependent pathway is common to all TLRs, except TLR3 (Adachi O. et al., 1998. Targeted disruption of the MyD88 gene results in loss of IL-1- and IL-18-mediated function. Immunity. 9(1):143-50). Upon activation by PAMPs or DAMPs, TLRs hetero- or homodimerize inducing the recruitment of adaptor proteins via the cytoplasmic TIR domain. Individual TLRs induce different signaling responses by usage of the different adaptor molecules. TLR4 and TLR2 signaling requires the adaptor TIRAP/Mal, which is involved in the MyD88-dependent pathway. TLR3 triggers the production of IFN-β in response to double-stranded RNA, in a MyD88-independent manner, through the adaptor TRIF/TICAM-1. TRAM/TICAM-2 is another adaptor molecule involved in the MyD88-independent pathway which function is restricted to the TLR4 pathway.

[0641] TLR3, TLR7, TLR8 and TLR9 recognize viral nucleic acids and induce type I IFNs. The signaling mechanisms leading to the induction of type I IFNs differ depending on the TLR activated. They involve the interferon regulatory factors, IRFs, a family of transcription factors known to play a critical role in antiviral defense, cell growth and immune regulation. Three IRFs (IRF3, IRF5 and IRF7) function as direct transducers of virus-mediated TLR signaling. TLR3 and TLR4 activate IRF3 and IRF7, while TLR7 and TLR8 activate IRF5 and IRF7 (Doyle S. et al., 2002. IRF3 mediates a TLR3/TLR4-specific antiviral gene program. Immunity. 17(3):251-63). Furthermore, type I IFN production stimulated by TLR9 ligand CpG-A has been shown to be mediated by PI(3)K and mTOR (Costa-Mattioli M. & Sonenberg N. 2008. RAPping production of type I interferon in pDCs through mTOR. Nature Immunol. 9: 1097-1099).

[0642] TLR-9

[0643] TLR9 recognizes unmethylated CpG sequences in DNA molecules. CpG sites are relatively rare (˜1%) on vertebrate genomes in comparison to bacterial genomes or viral DNA. TLR9 is expressed by numerous cells of the immune system such as B lymphocytes, monocytes, natural killer (NK) cells, and plasmacytoid dendritic cells. TLR9 is expressed intracellularly, within the endosomal compartments and functions to alert the immune system of viral and bacterial infections by binding to DNA rich in CpG motifs. TLR9 signals leads to activation of the cells initiating pro-inflammatory reactions that result in the production of cytokines such as type-I interferon and IL-12.

[0644] TLR Agonists

[0645] A TLR agonist can agonize one or more TLR, e.g., one or more of human TLR-1, 2, 3, 4, 5, 6, 7, 8, 9, or 10. In some embodiments, an adjunctive agent described herein is a TLR agonist. In some embodiments, the TLR agonist specifically agonizes human TLR-9. In some embodiments, the TLR-9 agonist is a CpG moiety. As used herein, a CpG moiety, is a linear dinucleotide having the sequence: 5′-C-phosphate-G-3′, that is, cytosine and guanine separated by only one phosphate.

[0646] In some embodiments, the CpG moiety comprises at least 1, 2, 3, 4, 5, 6, 7, 8, 9, 10, 11, 12, 13, 14, 15, 16, 17, 18, 19, 20, 21, 22, 23, 24, 25, 26, 27, 28, 29, 30, or more CpG dinucleotides. In some embodiments, the CpG moiety consists of 1, 2, 3, 4, 5, 6, 7, 8, 9, 10, 11, 12, 13, 14, 15, 16, 17, 18, 19, 20, 21, 22, 23, 24, 25, 26, 27, 28, 29, or 30 CpG dinucleotides. In some embodiments, the CpG moiety has 1-5, 1-10, 1-20, 1-30, 1-40, 1-50, 5-10, 5-20, 5-30, 10-20, 10-30, 10-40, or 10-50 CpG dinucleotides.

[0647] In some embodiments, the TLR-9 agonist is a synthetic ODN (oligodeoxynucleotides). CpG ODNs are short synthetic single-stranded DNA molecules containing unmethylated CpG dinucleotides in particular sequence contexts (CpG motifs). CpG ODNs possess a partially or completely phosphorothioated (PS) backbone, as opposed to the natural phosphodiester (PO) backbone found in genomic bacterial DNA. There are three major classes of CpG ODNs: classes A, B and C, which differ in their immunostimulatory activities. CpG-A ODNs are characterized by a PO central CpG-containing palindromic motif and a PS-modified 3′ poly-G string. They induce high IFN-α production from pDCs but are weak stimulators of TLR9-dependent NF-κB signaling and pro-inflammatory cytokine (e.g. IL-6) production. CpG-B ODNs contain a full PS backbone with one or more CpG dinucleotides. They strongly activate B cells and TLR9-dependent NF-κB signaling but weakly stimulate IFN-α secretion. CpG-C ODNs combine features of both classes A and B. They contain a complete PS backbone and a CpG-containing palindromic motif C-Class CpG ODNs induce strong IFN-α production from pDC as well as B cell stimulation.

### Cytokine Molecules

[0648] Cytokines are generally polypeptides that influence cellular activity, for example, through signal transduction pathways. Accordingly, a cytokine of the multispecific or multifunctional polypeptide is useful and can be associated with receptor-mediated signaling that transmits a signal from outside the cell membrane to modulate a response within the cell. Cytokines are proteinaceous signaling compounds that are mediators of the immune response. They control many different cellular functions including proliferation, differentiation and cell survival/apoptosis; cytokines are also involved in several pathophysiological processes including viral infections and autoimmune diseases. Cytokines are synthesized under various stimuli by a variety of cells of both the innate (monocytes, macrophages, dendritic cells) and adaptive (T- and B-cells) immune systems. Cytokines can be classified into two groups: pro- and anti-inflammatory. Pro-inflammatory cytokines, including IFNγ, IL-1, IL-6 and TNF-alpha, are predominantly derived from the innate immune cells and Th1 cells. Anti-inflammatory cytokines, including IL-10, IL-4, IL-13 and IL-5, are synthesized from Th2 immune cells.

[0649] The present disclosure provides, inter alia, multispecific (e.g., bi-, tri-, quad-specific) or multifunctional molecules, that include, e.g., are engineered to contain, one or more cytokine molecules, e.g., immunomodulatory (e.g., proinflammatory) cytokines and variants, e.g., functional variants, thereof. Accordingly, in some embodiments, the cytokine molecule is an interleukin or a variant, e.g., a functional variant thereof. In some embodiments the interleukin is a proinflammatory interleukin. In some embodiments the interleukin is chosen from interleukin-2 (IL-2), interleukin-12 (IL-12), interleukin-15 (IL-15), interleukin-18 (IL-18), interleukin-21 (IL-21), interleukin-7 (IL-7), or interferon gamma. In some embodiments, the cytokine molecule is a proinflammatory cytokine.

[0650] In certain embodiments, the cytokine is a single chain cytokine. In certain embodiments, the cytokine is a multichain cytokine (e.g., the cytokine comprises 2 or more (e.g., 2) polypeptide chains. An exemplary multichain cytokine is IL-12.

[0651] Examples of useful cytokines include, but are not limited to, GM-CSF, IL-1α, IL-1β, IL-2, IL-3, IL-4, IL-5, IL-6, IL-7, IL-8, IL-10, IL-12, IL-21, IFN-α, IFN-β, IFN-γ, MIP-1α, MIP-1β, TGF-β, TNF-α, and TNFβ. In one embodiment the cytokine of the multispecific or multifunctional polypeptide is a cytokine selected from the group of GM-CSF, IL-2, IL-7, IL-8, IL-10, IL-12, IL-15, IL-21, IFN-α, IFN-γ, MIP-1α, MIP-1β and TGF-β. In one embodiment the cytokine of the multispecific or multifunctional polypeptide is a cytokine selected from the group of IL-2, IL-7, IL-10, IL-12, IL-15, IFN-α, and IFN-γ. In certain embodiments the cytokine is mutated to remove N- and/or O-glycosylation sites. Elimination of glycosylation increases homogeneity of the product obtainable in recombinant production. In certain embodiments, the cytokine is TGF-β. In certain embodiments, the multispecific or multifunctional polypeptide comprises a TGF-β inhibitor.

[0652] In one embodiment, the cytokine of the multispecific or multifunctional polypeptide is IL-2. In a specific embodiment, the IL-2 cytokine can elicit one or more of the cellular responses selected from the group consisting of: proliferation in an activated T lymphocyte cell, differentiation in an activated T lymphocyte cell, cytotoxic T cell (CTL) activity, proliferation in an activated B cell, differentiation in an activated B cell, proliferation in a natural killer (NK) cell, differentiation in a NK cell, cytokine secretion by an activated T cell or an NK cell, and NK/lymphocyte activated killer (LAK) antitumor cytotoxicity. In another particular embodiment the IL-2 cytokine is a mutant IL-2 cytokine having reduced binding affinity to the .alpha.-subunit of the IL-2 receptor. Together with the .beta.- and .gamma.-subunits (also known as CD122 and CD132, respectively), the .alpha.-subunit (also known as CD25) forms the heterotrimeric high-affinity IL-2 receptor, while the dimeric receptor consisting only of the β- and γ-subunits is termed the intermediate-affinity IL-2 receptor. As described in PCT patent application number PCT/EP2012/051991, which is incorporated herein by reference in its entirety, a mutant IL-2 polypeptide with reduced binding to the .alpha.-subunit of the IL-2 receptor has a reduced ability to induce IL-2 signaling in regulatory T cells, induces less activation-induced cell death (AICD) in T cells, and has a reduced toxicity profile in vivo, compared to a wild-type IL-2 polypeptide. The use of such an cytokine with reduced toxicity is particularly advantageous in a multispecific or multifunctional polypeptide according to the invention, having a long serum half-life due to the presence of an Fc domain. In one embodiment, the mutant IL-2 cytokine of the multispecific or multifunctional polypeptide according to the invention comprises at least one amino acid mutation that reduces or abolishes the affinity of the mutant IL-2 cytokine to the .alpha.-subunit of the IL-2 receptor (CD25) but preserves the affinity of the mutant IL-2 cytokine to the intermediate-affinity IL-2 receptor (consisting of the β and γ subunits of the IL-2 receptor), compared to the non-mutated IL-2 cytokine. In one embodiment the one or more amino acid mutations are amino acid substitutions. In a specific embodiment, the mutant IL-2 cytokine comprises one, two or three amino acid substitutions at one, two or three position(s) selected from the positions corresponding to residue 42, 45, and 72 of human IL-2. In a more specific embodiment, the mutant IL-2 cytokine comprises three amino acid substitutions at the positions corresponding to residue 42, 45 and 72 of human IL-2. In an even more specific embodiment, the mutant IL-2 cytokine is human IL-2 comprising the amino acid substitutions F42A, Y45A and L72G. In one embodiment the mutant IL-2 cytokine additionally comprises an amino acid mutation at a position corresponding to position 3 of human IL-2, which eliminates the O-glycosylation site of IL-2. Particularly, said additional amino acid mutation is an amino acid substitution replacing a threonine residue by an alanine residue. A particular mutant IL-2 cytokine useful in the invention comprises four amino acid substitutions at positions corresponding to residues 3, 42, 45 and 72 of human IL-2. Specific amino acid substitutions are T3A, F42A, Y45A and L72G. As demonstrated in PCT patent application number PCT/EP2012/051991 and in the appended Examples, said quadruple mutant IL-2 polypeptide (IL-2 qm) exhibits no detectable binding to CD25, reduced ability to induce apoptosis in T cells, reduced ability to induce IL-2 signaling in T.sub.reg cells, and a reduced toxicity profile in vivo. However, it retains ability to activate IL-2 signaling in effector cells, to induce proliferation of effector cells, and to generate IFN-γ as a secondary cytokine by NK cells.

[0653] The IL-2 or mutant IL-2 cytokine according to any of the above embodiments may comprise additional mutations that provide further advantages such as increased expression or stability. For example, the cysteine at position 125 may be replaced with a neutral amino acid such as alanine, to avoid the formation of disulfide-bridged IL-2 dimers. Thus, in certain embodiments the IL-2 or mutant IL-2 cytokine of the multispecific or multifunctional polypeptide according to the invention comprises an additional amino acid mutation at a position corresponding to residue 125 of human IL-2. In one embodiment said additional amino acid mutation is the amino acid substitution C125A.

[0654] In a specific embodiment the IL-2 cytokine of the multispecific or multifunctional polypeptide comprises the polypeptide sequence of SEQ ID NO: 227 [APTSSSTKKTQLQLEHLLLDLQMILNGINN YKNPKLTRMLTFKFYMPKKATELKHLQCLEEELKPLEEVLNLAQSKNFHL RPRDLISNINVIVLELKGSETTFMCEYADETATIVEFLNRWITFAQSIISTLT]. In another specific embodiment the IL-2 cytokine of the multispecific or multifunctional polypeptide comprises the polypeptide sequence of SEQ ID NO: 228 [APASSSTKKT QLQLEHLLLD LQMILNGINN YKNPKLTRMLTAKFAMPKKATELKHLQCLE EELKPLEEVLNGAQSKNFHL RPRDLISNIN VIVLELKGSETTFMCEYADETATIVEFLNRWITFAQSIISTLT].

[0655] In another embodiment the cytokine of the multispecific or multifunctional polypeptide is IL-12. In a specific embodiment said IL-12 cytokine is a single chain IL-12 cytokine. In an even more specific embodiment the single chain IL-12 cytokine comprises the polypeptide sequence of SEQ ID NO: 229 [IWELKKDVYVVELDWYPDAPGEMVVLTCDTPEEDGITWTLDQSSEVLGSGKTLTIQVKEFGDAGQ YTCHKGGEVLSHSLLLLHKKEDGIWSTDILKDQKEPKNKTFLRCEAKNYSGRFTCWWLTTISTDLTF SVKSSRGSSDPQGVTCGAATLSAERVRGDNKEYEYSVECQEDSACPAAEESLPIEVMVDAVHKLKY ENYTSSFFIRDIIKPDPPKNLQLKPLKNSRQVEVSWEYPDTWSTPHSYFSLTFCVQVQGKSKREKKDR VFTDKTSATVICRKNASISVRAQDRYYSSSWSEWASVPCSGGGGSGGGGSGGGGSRNLPVATPDPG MFPCLHHSQNLLRAVSNMLQKARQTLEFYPCTSEEIDHEDITKDKTSTVEACLPLELTKNESCLNSR ETSFITNGSCLASRKTSFMMALCLSSIYEDLKMYQVEFKTMNAKLLMDPKRQIFLDQNMLAVIDEL MQALNFNSETVPQKSSLEEPDFYKTKIKLCILLHAFRIRAVTIDRVMSYLNAS]. In one embodiment, the IL-12 cytokine can elicit one or more of the cellular responses selected from the group consisting of: proliferation in a NK cell, differentiation in a NK cell, proliferation in a T cell, and differentiation in a T cell.

[0656] In another embodiment the cytokine of the multispecific or multifunctional polypeptide is IL-10. In a specific embodiment said IL-10 cytokine is a single chain IL-10 cytokine. In an even more specific embodiment the single chain IL-10 cytokine comprises the polypeptide sequence of SEQ ID NO: 230 [SPGQGTQSENSCTHFPGNLPNMLRDLRDAFSRVKTFFQMKDQLDNLLLKESLLEDFKGYLGCQALS EMIQFYLEEVMPQAENQDPDIKAHVNSLGENLKTLRLRLRRCHRFLPCENKSKAVEQVKNAFNKLQ EKGIYKAMSEFDIFINYIEAYMTMKIRNGGGGSGGGGSGGGGSGGGGSSPGQGTQSENSCTHFPGNL PNMLRDLRDAFSRVKTFFQMKDQLDNLLLKESLLEDFKGYLGCQALSEMIQFYLEEVMPQAENQD PDIKAHVNSLGENLKTLRLRLRRCHRFLPCENKSKAVEQVKNAFNKLQEKGIYKAMSEFDIFINYIE AYMTMKIRN]. In another specific embodiment the IL-10 cytokine is a monomeric IL-10 cytokine. In a more specific embodiment the monomeric IL-10 cytokine comprises the polypeptide sequence of SEQ ID NO: 231 [SPGQGTQSENSCTHFPGNLPNMLRDLRDAFSRVKTFFQMKDQLDNLLLKESLLEDFKGYLGCQALS EMIQFYLEEVMPQAENQDPDIKAHVNSLGENLKTLRLRLRRCHRFLPCENGGGSGGKSKAVEQVKN AFNKLQEKGIYKAMSEFDIFINYIEAYMTMKIRN]. In one embodiment, the IL-10 cytokine can elicit one or more of the cellular responses selected from the group consisting of: inhibition of cytokine secretion, inhibition of antigen presentation by antigen presenting cells, reduction of oxygen radical release, and inhibition of T cell proliferation. A multispecific or multifunctional polypeptide according to the invention wherein the cytokine is IL-10 is particularly useful for downregulation of inflammation, e.g. in the treatment of an inflammatory disorder.

[0657] In another embodiment, the cytokine of the multispecific or multifunctional polypeptide is IL-15. In a specific embodiment said IL-15 cytokine is a mutant IL-15 cytokine having reduced binding affinity to the α′-subunit of the IL-15 receptor. Without wishing to be bound by theory, a mutant IL-15 polypeptide with reduced binding to the .alpha.-subunit of the IL-15 receptor has a reduced ability to bind to fibroblasts throughout the body, resulting in improved pharmacokinetics and toxicity profile, compared to a wild-type IL-15 polypeptide. The use of an cytokine with reduced toxicity, such as the described mutant IL-2 and mutant IL-15 effector moieties, is particularly advantageous in a multispecific or multifunctional polypeptide according to the invention, having a long serum half-life due to the presence of an Fc domain. In one embodiment the mutant IL-15 cytokine of the multispecific or multifunctional polypeptide according to the invention comprises at least one amino acid mutation that reduces or abolishes the affinity of the mutant IL-15 cytokine to the .alpha.-subunit of the IL-15 receptor but preserves the affinity of the mutant IL-15 cytokine to the intermediate-affinity IL-15/IL-2 receptor (consisting of the .beta.- and .gamma.-subunits of the IL-15/IL-2 receptor), compared to the non-mutated IL-15 cytokine. In one embodiment the amino acid mutation is an amino acid substitution. In a specific embodiment, the mutant IL-15 cytokine comprises an amino acid substitution at the position corresponding to residue 53 of human IL-15. In a more specific embodiment, the mutant IL-15 cytokine is human IL-15 comprising the amino acid substitution E53A. In one embodiment the mutant IL-15 cytokine additionally comprises an amino acid mutation at a position corresponding to position 79 of human IL-15, which eliminates the N-glycosylation site of IL-15. Particularly, said additional amino acid mutation is an amino acid substitution replacing an asparagine residue by an alanine residue. In an even more specific embodiment the IL-15 cytokine comprises the polypeptide sequence of SEQ ID NO: 232 [NWVNVISDLKKIEDLIQSMHIDATLYTESDVHPSCKVTAMKCFLLELQVISLASGDASIHDTVENLII LANNSLSSNGAVTESGCKECEELEEKNIKEFLQSFVHIVQMFINTS]. In one embodiment, the IL-15 cytokine can elicit one or more of the cellular responses selected from the group consisting of: proliferation in an activated T lymphocyte cell, differentiation in an activated T lymphocyte cell, cytotoxic T cell (CTL) activity, proliferation in an activated B cell, differentiation in an activated B cell, proliferation in a natural killer (NK) cell, differentiation in a NK cell, cytokine secretion by an activated T cell or an NK cell, and NK/lymphocyte activated killer (LAK) antitumor cytotoxicity.

[0658] Mutant cytokine molecules useful as effector moieties in the multispecific or multifunctional polypeptide can be prepared by deletion, substitution, insertion or modification using genetic or chemical methods well known in the art. Genetic methods may include site-specific mutagenesis of the encoding DNA sequence, PCR, gene synthesis, and the like. The correct nucleotide changes can be verified for example by sequencing. Substitution or insertion may involve natural as well as non-natural amino acid residues. Amino acid modification includes well known methods of chemical modification such as the addition or removal of glycosylation sites or carbohydrate attachments, and the like.

[0659] In one embodiment, the cytokine, particularly a single-chain cytokine, of the multispecific or multifunctional polypeptide is GM-CSF. In a specific embodiment, the GM-CSF cytokine can elicit proliferation and/or differentiation in a granulocyte, a monocyte or a dendritic cell. In one embodiment, the cytokine, particularly a single-chain cytokine, of the multispecific or multifunctional polypeptide is IFN-α. In a specific embodiment, the IFN-α cytokine can elicit one or more of the cellular responses selected from the group consisting of: inhibiting viral replication in a virus-infected cell, and upregulating the expression of major histocompatibility complex I (MHC I). In another specific embodiment, the IFN-α cytokine can inhibit proliferation in a tumor cell. In one embodiment the cytokine, particularly a single-chain cytokine, of the multispecific or multifunctional polypeptide is IFNγ. In a specific embodiment, the IFN-γ cytokine can elicit one or more of the cellular responses selected from the group of: increased macrophage activity, increased expression of MHC molecules, and increased NK cell activity. In one embodiment the cytokine, particularly a single-chain cytokine, of the multispecific or multifunctional polypeptide is IL-7. In a specific embodiment, the IL-7 cytokine can elicit proliferation of T and/or B lymphocytes. In one embodiment, the cytokine, particularly a single-chain cytokine, of the multispecific or multifunctional polypeptide is IL-8. In a specific embodiment, the IL-8 cytokine can elicit chemotaxis in neutrophils. In one embodiment, the cytokine, particularly a single-chain cytokine, of the multispecific or multifunctional polypeptide, is MIP-1α. In a specific embodiment, the MIP-1α cytokine can elicit chemotaxis in monocytes and T lymphocyte cells. In one embodiment, the cytokine, particularly a single-chain cytokine, of the multispecific or multifunctional polypeptide is MIP-1β. In a specific embodiment, the MIP-1β cytokine can elicit chemotaxis in monocytes and T lymphocyte cells. In one embodiment, the cytokine, particularly a single-chain cytokine, of the multispecific or multifunctional polypeptide is TGF-β. In a specific embodiment, the TGF-β cytokine can elicit one or more of the cellular responses selected from the group consisting of: chemotaxis in monocytes, chemotaxis in macrophages, upregulation of IL-1 expression in activated macrophages, and upregulation of IgA expression in activated B cells.

[0660] In one embodiment, the multispecific or multifunctional polypeptide of the invention binds to an cytokine receptor with a dissociation constant (K_{D}) that is at least about 1, 1.5, 2, 2.5, 3, 3.5, 4, 4.5, 5, 5.5, 6, 6.5, 7, 7.5, 8, 8.5, 9, 9.5 or 10 times greater than that for a control cytokine. In another embodiment, the multispecific or multifunctional polypeptide binds to an cytokine receptor with a K_{D} that is at least 2, 3, 4, 5, 6, 7, 8, 9, or 10 times greater than that for a corresponding multispecific or multifunctional polypeptide comprising two or more effector moieties. In another embodiment, the multispecific or multifunctional polypeptide binds to an cytokine receptor with a dissociation constant K_{D} that is about 10 times greater than that for a corresponding the multispecific or multifunctional polypeptide comprising two or more cytokines.

[0661] In some embodiments, the multispecific molecules disclosed herein include a cytokine molecule. In embodiments, the cytokine molecule includes a full length, a fragment or a variant of a cytokine; a cytokine receptor domain, e.g., a cytokine receptor dimerizing domain; or an agonist of a cytokine receptor, e.g., an antibody molecule (e.g., an agonistic antibody) to a cytokine receptor.

[0662] In some embodiments the cytokine molecule is chosen from IL-2, IL-12, IL-15, IL-18, IL-7, IL-21, or interferon gamma, or a fragment or variant thereof, or a combination of any of the aforesaid cytokines. The cytokine molecule can be a monomer or a dimer. In embodiments, the cytokine molecule can further include a cytokine receptor dimerizing domain.

[0663] In other embodiments, the cytokine molecule is an agonist of a cytokine receptor, e.g., an antibody molecule (e.g., an agonistic antibody) to a cytokine receptor chosen from an IL-15Ra or IL-21R.

[0664] In one embodiment, the cytokine molecule is IL-15, e.g., human IL-15 (e.g., comprising the amino acid sequence:

[0665] NWVNVISDLKKIEDLIQSMHIDATLYTESDVHPSCKVTAMKCFLLELQVISLESGDASIHDT VENLIILANNSLSSNGNVTESGCKECEELEEKNIKEFLQSFVHIVQMFINTS (SEQ ID NO: 17), a fragment thereof, or an amino acid sequence substantially identical thereto (e.g., 95% to 99.9% identical thereto, or having at least one amino acid alteration, but not more than five, ten or fifteen alterations (e.g., substitutions, deletions, or insertions, e.g., conservative substitutions) to the amino acid sequence of SEQ ID NO: 17.

[0666] In some embodiments, the cytokine molecule comprises a receptor dimerizing domain, e.g., an IL15Ralpha dimerizing domain. In one embodiment, the IL15Ralpha dimerizing domain comprises the amino acid sequence: MAPRRARGCRTLGLPALLLLLLLRPPATRGITCPPPMSVEHADIWVKSYSLYSRERYICNSGFKRKA GTSSLTECVL (SEQ ID NO: 18), a fragment thereof, or an amino acid sequence substantially identical thereto (e.g., 95% to 99.9% identical thereto, or having at least one amino acid alteration, but not more than five, ten or fifteen alterations (e.g., substitutions, deletions, or insertions, e.g., conservative substitutions) to the amino acid sequence of SEQ ID NO: 18. In some embodiments, the cytokine molecule (e.g., IL-15) and the receptor dimerizing domain (e.g., an IL15Ralpha dimerizing domain) of the multispecific molecule are covalently linked, e.g., via a linker (e.g., a Gly-Ser linker, e.g., a linker comprising the amino acid sequence SGGSGGGGSGGGSGGGGSLQ (SEQ ID NO: 19). In other embodiments, the cytokine molecule (e.g., IL-15) and the receptor dimerizing domain (e.g., an IL15Ralpha dimerizing domain) of the multispecific molecule are not covalently linked, e.g., are non-covalently associated.

[0667] In other embodiments, the cytokine molecule is IL-2, e.g., human IL-2 (e.g., comprising the amino acid sequence: APTSSSTKKTQLQLEHLLLDLQMILNGINNYKNPKLTRMLTFKFYMPKKATELKHLQCLEEELKPLE EVLNLAQSKNFHLRPRDLISNINVIVLELKGSETTFMCEYADETATIVEFLNRWITFCQSIISTLT (SEQ ID NO: 20), a fragment thereof, or an amino acid sequence substantially identical thereto (e.g., 95% to 99.9% identical thereto, or having at least one amino acid alteration, but not more than five, ten or fifteen alterations (e.g., substitutions, deletions, or insertions, e.g., conservative substitutions) to the amino acid sequence of SEQ ID NO:20).

[0668] In other embodiments, the cytokine molecule is IL-18, e.g., human IL-18 (e.g., comprising the amino acid sequence: YFGKLESKLSVIRNLNDQVLFIDQGNRPLFEDMTDSDCRDNAPRTIFIISMYKDSQPRGMAVTISVKC EKISTLSCENKIISFKEMNPPDNIKDTKSDIIFFQRSVPGHDNKMQFESSSYEGYFLACEKERDLFKLIL KKEDELGDRSIMFTVQNED (SEQ ID NO: 21), a fragment thereof, or an amino acid sequence substantially identical thereto (e.g., 95% to 99.9% identical thereto, or having at least one amino acid alteration, but not more than five, ten or fifteen alterations (e.g., substitutions, deletions, or insertions, e.g., conservative substitutions) to the amino acid sequence of SEQ ID NO: 21).

[0669] In other embodiments, the cytokine molecule is IL-21, e.g., human IL-21 (e.g., comprising the amino acid sequence: QGQDRHMIRMRQLIDIVDQLKNYVNDLVPEFLPAPEDVETNCEWSAFSCFQKAQLKSANTGNNERII NVSIKKLKRKPPSTNAGRRQKHRLTCPSCDSYEKKPPKEFLERFKSLLQKMIHQHLSSRTHGSEDS (SEQ ID NO: 22), a fragment thereof, or an amino acid sequence substantially identical thereto (e.g., 95% to 99.9% identical thereto, or having at least one amino acid alteration, but not more than five, ten or fifteen alterations (e.g., substitutions, deletions, or insertions, e.g., conservative substitutions) to the amino acid sequence of SEQ ID NO: 22).

[0670] In yet other embodiments, the cytokine molecule is interferon gamma, e.g., human interferon gamma (e.g., comprising the amino acid sequence: QDPYVKEAENLKKYFNAGHSDVADNGTLFLGILKNWKEESDRKIMQSQIVSFYFKLFKNFKDDQSI QKSVETIKEDMNVKFFNSNKKKRDDFEKLTNYSVTDLNVQRKAIHELIQVMAELSPAAKTGKRKRS QMLFRG (SEQ ID NO: 23), a fragment thereof, or an amino acid sequence substantially identical thereto (e.g., 95% to 99.9% identical thereto, or having at least one amino acid alteration, but not more than five, ten or fifteen alterations (e.g., substitutions, deletions, or insertions, e.g., conservative substitutions) to the amino acid sequence of SEQ ID NO: 23).

### TGF-β Inhibitor

[0671] In one aspect, provided herein is a multispecific or multifunctional polypeptide (e.g., antibody molecule) comprising a modulator of TGF-β (e.g., a TGF-β inhibitor). In some embodiments, the TGF-β inhibitor binds to and inhibits TGF-β, e.g., reduces the activity of TGF-β. In some embodiments, the TGF-β inhibitor inhibits (e.g., reduces the activity of) TGF-β 1. In some embodiments, the TGF-β inhibitor inhibits (e.g., reduces the activity of) TGF-β 2. In some embodiments, the TGF-β inhibitor inhibits (e.g., reduces the activity of) TGF-β 3. In some embodiments, the TGF-β inhibitor inhibits (e.g., reduces the activity of) TGF-β 1 and TGF-β 3. In some embodiments, the TGF-β inhibitor inhibits (e.g., reduces the activity of) TGF-β 1, TGF-β 2, and TGF-β 3.

[0672] In some embodiments, the TGF-β inhibitor comprises a portion of a TGF-β receptor (e.g., an extracellular domain of a TGF-β receptor) that is capable of inhibiting (e.g., reducing the activity of) TGF-β, or functional fragment or variant thereof. In some embodiments, the TGF-β inhibitor comprises a TGFBR1 polypeptide (e.g., an extracellular domain of TGFBR1 or functional variant thereof). In some embodiments, the TGF-β inhibitor comprises a TGFBR2 polypeptide (e.g., an extracellular domain of TGFBR2 or functional variant thereof). In some embodiments, the TGF-β inhibitor comprises a TGFBR3 polypeptide (e.g., an extracellular domain of TGFBR3 or functional variant thereof). In some embodiments, the TGF-β inhibitor comprises a TGFBR1 polypeptide (e.g., an extracellular domain of TGFBR1 or functional variant thereof) and a TGFBR2 polypeptide (e.g., an extracellular domain of TGFBR2 or functional variant thereof). In some embodiments, the TGF-β inhibitor comprises a TGFBR1 polypeptide (e.g., an extracellular domain of TGFBR1 or functional variant thereof) and a TGFBR3 polypeptide (e.g., an extracellular domain of TGFBR3 or functional variant thereof). In some embodiments, the TGF-β inhibitor comprises a TGFBR2 polypeptide (e.g., an extracellular domain of TGFBR2 or functional variant thereof) and a TGFBR3 polypeptide (e.g., an extracellular domain of TGFBR3 or functional variant thereof).

[0673] Exemplary TGF-β receptor polypeptides that can be used as TGF-β inhibitors have been disclosed in U.S. Pat. Nos. 8,993,524, 9,676,863, 8,658,135, US20150056199, US20070184052, and WO2017037634, all of which are herein incorporated by reference in their entirety.

[0674] In some embodiments, the TGF-β inhibitor comprises an extracellular domain of TGFBR1 or a sequence substantially identical thereto (e.g., a sequence that is at least 80%, 85%, 90%, or 95% identical thereto). In some embodiments, the TGF-β inhibitor comprises an extracellular domain of SEQ ID NO: 3095, or a sequence substantially identical thereto (e.g., a sequence that is at least 80%, 85%, 90%, or 95% identical thereto). In some embodiments, the TGF-β inhibitor comprises an extracellular domain of SEQ ID NO: 3096, or a sequence substantially identical thereto (e.g., a sequence that is at least 80%, 85%, 90%, or 95% identical thereto). In some embodiments, the TGF-β inhibitor comprises an extracellular domain of SEQ ID NO: 3097, or a sequence substantially identical thereto (e.g., a sequence that is at least 80%, 85%, 90%, or 95% identical thereto). In some embodiments, the TGF-β inhibitor comprises the amino acid sequence of SEQ ID NO: 3104, or a sequence substantially identical thereto (e.g., a sequence that is at least 80%, 85%, 90%, or 95% identical thereto). In some embodiments, the TGF-β inhibitor comprises the amino acid sequence of SEQ ID NO: 3105, or a sequence substantially identical thereto (e.g., a sequence that is at least 80%, 85%, 90%, or 95% identical thereto).

[0675] In some embodiments, the TGF-β inhibitor comprises an extracellular domain of TGFBR2 or a sequence substantially identical thereto (e.g., a sequence that is at least 80%, 85%, 90%, or 95% identical thereto). In some embodiments, the TGF-β inhibitor comprises an extracellular domain of SEQ ID NO: 3098, or a sequence substantially identical thereto (e.g., a sequence that is at least 80%, 85%, 90%, or 95% identical thereto). In some embodiments, the TGF-β inhibitor comprises an extracellular domain of SEQ ID NO: 3099, or a sequence substantially identical thereto (e.g., a sequence that is at least 80%, 85%, 90%, or 95% identical thereto). In some embodiments, the TGF-β inhibitor comprises the amino acid sequence of SEQ ID NO: 3100, or a sequence substantially identical thereto (e.g., a sequence that is at least 80%, 85%, 90%, or 95% identical thereto). In some embodiments, the TGF-β inhibitor comprises the amino acid sequence of SEQ ID NO: 3101, or a sequence substantially identical thereto (e.g., a sequence that is at least 80%, 85%, 90%, or 95% identical thereto). In some embodiments, the TGF-β inhibitor comprises the amino acid sequence of SEQ ID NO: 3102, or a sequence substantially identical thereto (e.g., a sequence that is at least 80%, 85%, 90%, or 95% identical thereto). In some embodiments, the TGF-β inhibitor comprises the amino acid sequence of SEQ ID NO: 3103, or a sequence substantially identical thereto (e.g., a sequence that is at least 80%, 85%, 90%, or 95% identical thereto).

[0676] In some embodiments, the TGF-β inhibitor comprises an extracellular domain of TGFBR3 or a sequence substantially identical thereto (e.g., a sequence that is at least 80%, 85%, 90%, or 95% identical thereto). In some embodiments, the TGF-β inhibitor comprises an extracellular domain of SEQ ID NO: 3106, or a sequence substantially identical thereto (e.g., a sequence that is at least 80%, 85%, 90%, or 95% identical thereto). In some embodiments, the TGF-β inhibitor comprises an extracellular domain of SEQ ID NO: 3107, or a sequence substantially identical thereto (e.g., a sequence that is at least 80%, 85%, 90%, or 95% identical thereto). In some embodiments, the TGF-β inhibitor comprises the amino acid sequence of SEQ ID NO: 3108, or a sequence substantially identical thereto (e.g., a sequence that is at least 80%, 85%, 90%, or 95% identical thereto).

[0677] In some embodiments, the TGF-β inhibitor comprises no more than one TGF-β receptor extracellular domain. In some embodiments, the TGF-β inhibitor comprises two or more (e.g., two, three, four, five, or more) TGF-β receptor extracellular domains, linked together, e.g., via a linker.

[0678] In some embodiments, the TGF p inhibitor comprises a TGF-beta receptor ECD homodimer. In some embodiments, the TGFβ inhibitor comprises a TGF-beta receptor ECD heterodimer. In some embodiments, the two TGFBR ECD domains are linked to two Fc regions, e.g., the C-terminus of two Fc regions. In some embodiments, the two TGFBR ECD domains are linked to CH1 and CL, respectively.

TABLE 4
Exemplary amino acid sequences of TGF-β polypeptides or
TGF-β receptor polypeptides

| SEQ ID | | |
|---|---|---|
| NO | Description | Amino acid sequence |
| SEQ ID | Immature | MPPSGLRLLLLLLPLLWLLVLTPGRPAAGLSTCKTIDMELVKRKRIEAI |
| NO: 3092 | human | RGQILSKLRLASPPSQGEVPPGPLPEAVLALYNSTRDRVAGESAEPEPE |
| | TGF-β 1 | PEADYYAKEVTRVLMVETHNEIYDKFKQSTHSIYMFFNTSELREAVPE |
| | (P01137-1) | PVLLSRAELRLLRLKLKVEQHVELYQKYSNNSWRYLSNRLLAPSDSP |
| | | EWLSFDVTGVVRQWLSRGGEIEGFRLSAHCSCDSRDNTLQVDINGFT |
| | | TGRRGDLATIHGMNRPFLLLMATPLERAQHLQSSRHRRALDTNYCFS |
| | | STEKNCCVRQLYIDFRKDLGWKWIHEPKGYHANFCLGPCPYIWSLDT |
| | | QYSKVLALYNQHNPGASAAPCCVPQALEPLPIVYYVGRKPKVEQLSN |
| | | MIVRSCKCS |
| SEQ ID | Human | LSTCKTIDMELVKRKRIEAIRGQILSKLRLASPPSQGEVPPGPLPEAVLA |
| NO: 3117 | TGF-β 1 | LYNSTRDRVAGESAEPEPEPEADYYAKEVTRVLMVETHNEIYDKFKQ |
| | (P01137-1) | STHSIYMFFNTSELREAVPEPVLLSRAELRLLRLKLKVEQHVELYQKY |
| | | SNNSWRYLSNRLLAPSDSPEWLSFDVTGVVRQWLSRGGEIEGFRLSA |
| | | HCSCDSRDNTLQVDINGFTTGRRGDLATIHGMNRPFLLLMATPLERA |
| | | QHLQSSRHRRALDTNYCFSSTEKNCCVRQLYIDFRKDLGWKWIHEPK |
| | | GYHANFCLGPCPYIWSLDTQYSKVLALYNQHNPGASAAPCCVPQALE |
| | | PLPIVYYVGRKPKVEQLSNMIVRSCKCS |
| SEQ ID | Immature | MHYCVLSAFLILHLVTVALSLSTCSTLDMDQFMRKRIEAIRGQILSKL |
| NO: 3093 | human | KLTSPPEDYPEPEEVPPEVISIYNSTRDLLQEKASRRAAACERERSDEE |
| | TGF-β 2 | YYAKEVYKIDMPPFFPSENAIPPTFYRPYFRIVRFDVSAMEKNASNLV |
| | (P61812-1) | KAEFRVFRLQNPKARVPEQRIELYQILKSKDLTSPTQRYIDSKVVKTR |
| | | AEGEWLSFDVTDAVHEWLHHKDRNLGFKISLHCPCCTFVPSNNYIIPN |
| | | KSEELEARFAGIDGTSTYTSGDQKTIKSTRKKNSGKTPHLLLMLLPSY |
| | | RLESQQTNRRKKRALDAAYCFRNVQDNCCLRPLYIDFKRDLGWKWI |
| | | HEPKGYNANFCAGACPYLWSSDTQHSRVLSLYNTINPEASASPCCVS |
| | | QDLEPLTILYYIGKTPKIEQLSNMIVKSCKCS |
| SEQ ID | Human | LSTCSTLDMDQFMRKRIEAIRGQILSKLKLTSPPEDYPEPEEVPPEVISI |
| NO: 3118 | TGF-β 2 | YNSTRDLLQEKASRRAAACERERSDEEYYAKEVYKIDMPPFFPSENAI |
| | (P61812-1) | PPTFYRPYFRIVRFDVSAMEKNASNLVKAEFRVFRLQNPKARVPEQRI |
| | | ELYQILKSKDLTSPTQRYIDSKVVKTRAEGEWLSFDVTDAVHEWLHH |
| | | KDRNLGFKISLHCPCCTFVPSNNYIIPNKSEELEARFAGIDGTSTYTSGD |
| | | QKTIKSTRKKNSGKTPHLLLMLLPSYRLESQQTNRRKKRALDAAYCF |
| | | RNVQDNCCLRPLYIDFKRDLGWKWIHEPKGYNANFCAGACPYLWSS |
| | | DTQHSRVLSLYNTINPEASASPCCVSQDLEPLTILYYIGKTPKIEQLSN |
| | | MIVKSCKCS |
| SEQ ID | Immature | MKMHLQRALVVLALLNFATVSLSLSTCTTLDFGHIKKKRVEAIRGQIL |
| NO: 3094 | human | SKLRLTSPPEPTVMTHVPYQVLALYNSTRELLEEMHGEREEGCTQENT |
| | TGF-β 3 | ESEYYAKEIHKFDMIQGLAEHNELAVCPKGITSKVFRFNVSSVEKNRT |
| | (P10600-1) | NLFRAEFRVLRVPNPSSKRNEQRIELFQILRPDEHIAKQRYIGGKNLPT |
| | | RGTAEWLSFDVTDTVREWLLRRESNLGLEISIHCPCHTFQPNGDILENI |
| | | HEVMEIKFKGVDNEDDHGRGDLGRLKKQKDHHNPHLILMMIPPHRL |
| | | DNPGQGGQRKKRALDTNYCFRNLEENCCVRPLYIDFRQDLGWKWVH |
| | | EPKGYYANFCSGPCPYLRSADTTHSTVLGLYNTLNPEASASPCCVPQD |
| | | LEPLTILYYVGRTPKVEQLSNMVVKSCKCS |
| SEQ ID | Human | LSTCTTLDFGHIKKKRVEAIRGQILSKLRLTSPPEPTVMTHVPYQVLAL |
| NO: 3119 | TGF-β 3 | YNSTRELLEEMHGEREEGCTQENTESEYYAKEIHKFDMIQGLAEHNE |
| | (P10600-1) | LAVCPKGITSKVFRFNVSSVEKNRTNLFRAEFRVLRVPNPSSKRNEQRI |
| | | ELFQILRPDEHIAKQRYIGGKNLPTRGTAEWLSFDVTDTVREWLLRRE |
| | | SNLGLEISIHCPCHTFQPNGDILENIHEVMEIKFKGVDNEDDHGRGDLG |
| | | RLKKQKDHHNPHLILMMIPPHRLDNPGQGGQRKKRALDTNYCFRNL |
| | | EENCCVRPLYIDFRQDLGWKWVHEPKGYYANFCSGPCPYLRSADTTH |
| | | STVLGLYNTLNPEASASPCCVPQDLEPLTILYYVGRTPKVEQLSNMVV |
| | | KSCKCS |
| SEQ ID | Immature | MEAAVAAPRPRLLLLVLAAAAAAAAALLPGATALQCFCHLCTKDNF |
| NO: 3095 | human | TCVTDGLCFVSVTETTDKVIHNSMCIAEIDLIPRDRPFVCAPSSKTGSV |
| | TGFBR1 | TTTYCCNQDHCNKIELPTTVKSSPGLGPVELAAVIAGPVCFVCISLML |
| | isoform 1 | MVYICHNRTVIHHRVPNEEDPSLDRPFISEGTTLKDLIYDMTTSGSGSG |
| | (P36897-1) | LPLLVQRTIARTIVLQESIGKGRFGEVWRGKWRGEEVAVKIFSSREERS |
| | | WFREAEIYQTVMLRHENILGFIAADNKDNGTWTQLWLVSDYHEHGS |
| | | LFDYLNRYTVTVEGMIKLALSTASGLAHLHMEIVGTQGKPAIAHRDL |
| | | KSKNILVKKNGTCCIADLGLAVRHDSATDTIDIAPNHRVGTKRYMAP |
| | | EVLDDSINMKHFESFKRADIYAMGLVFWEIARRCSIGGIHEDYQLPYY |
| | | DLVPSDPSVEEMRKVVCEQKLRPNIPNRWQSCEALRVMAKIMRECW |
| | | YANGAARLTALRIKKTLSQLSQQEGIKM |
| SEQ ID | Human | LQCFCHLCTKDNFTCVTDGLCFVSVTETTDKVIHNSMCIAEIDLIPRDR |
| NO: 3120 | TGFBR1 | PFVCAPSSKTGSVTTTYCCNQDHCNKIELPTTVKSSPGLGPVELAAVIA |
| | isoform 1 | GPVCFVCISLMLMVYICHNRTVIHHRVPNEEDPSLDRPFISEGTTLKDL |
| | (P36897-1) | IYDMTTSGSGSGLPLLVQRTIARTIVLQESIGKGRFGEVWRGKWRGEE |
| | | VAVKIFSSREERSWFREAEIYQTVMLRHENILGFIAADNKDNGTWTQL |
| | | WLVSDYHEHGSLFDYLNRYTVTVEGMIKLALSTASGLAHLHMEIVGT |
| | | QGKPAIAHRDLKSKNILVKKNGTCCIADLGLAVRHDSATDTIDIAPNH |
| | | RVGTKRYMAPEVLDDSINMKHFESFKRADIYAMGLVFWEIARRCSIG |
| | | GIHEDYQLPYYDLVPSDPSVEEMRKVVCEQKLRPNIPNRWQSCEALR |
| | | VMAKIMRECWYANGAARLTALRIKKTLSQLSQQEGIKM |
| SEQ ID | Immature | MEAAVAAPRPRLLLLVLAAAAAAAAALLPGATALQCFCHLCTKDNF |
| NO: 3096 | human | TCVTDGLCFVSVTETTDKVIHNSMCIAEIDLIPRDRPFVCAPSSKTGSV |
| | TGFBR1 | TTTYCCNQDHCNKIELPTTGPFSVKSSPGLGPVELAAVIAGPVCFVCIS |
| | isoform 2 | LMLMVYICHNRTVIHHRVPNEEDPSLDRPFISEGTTLKDLIYDMTTSGS |
| | (P36897-2) | GSGLPLLVQRTIARTIVLQESIGKGRFGEVWRGKWRGEEVAVKIFSSR |
| | | EERSWFREAEIYQTVMLRHENILGFIAADNKDNGTWTQLWLVSDYHE |
| | | HGSLFDYLNRYTVTVEGMIKLALSTASGLAHLHMEIVGTQGKPAIAH |
| | | RDLKSKNILVKKNGTCCIADLGLAVRHDSATDTIDIAPNHRVGTKRY |
| | | MAPEVLDDSINMKHFESFKRADIYAMGLVFWEIARRCSIGGIHEDYQL |
| | | PYYDLVPSDPSVEEMRKVVCEQKLRPNIPNRWQSCEALRVMAKIMRE |
| | | CWYANGAARLTALRIKKTLSQLSQQEGIKM |
| SEQ ID | Human | LQCFCHLCTKDNFTCVTDGLCFVSVTETTDKVIHNSMCIAEIDLIPRDR |
| NO: 3121 | TGFBR1 | PFVCAPSSKTGSVTTTYCCNQDHCNKIELPTTGPFSVKSSPGLGPVELA |
| | isoform 2 | AVIAGPVCFVCISLMLMVYICHNRTVIHHRVPNEEDPSLDRPFISEGTT |
| | (P36897-2) | LKDLIYDMTTSGSGSGLPLLVQRTIARTIVLQESIGKGRFGEVWRGKW |
| | | RGEEVAVKIFSSREERSWFREAEIYQTVMLRHENILGFIAADNKDNGT |
| | | WTQLWLVSDYHEHGSLFDYLNRYTVTVEGMIKLALSTASGLAHLHM |
| | | EIVGTQGKPAIAHRDLKSKNILVKKNGTCCIADLGLAVRHDSATDTIDI |
| | | APNHRVGTKRYMAPEVLDDSINMKHFESFKRADIYAMGLVFWEIARR |
| | | CSIGGIHEDYQLPYYDLVPSDPSVEEMRKVVCEQKLRPNIPNRWQSCE |
| | | ALRVMAKIMRECWYANGAARLTALRIKKTLSQLSQQEGIKM |
| SEQ ID | Immature | MEAAVAAPRPRLLLLVLAAAAAAAAALLPGATALQCFCHLCTKDNF |
| NO: 3097 | human | TCVTDGLCFVSVTETTDKVIHNSMCIAEIDLIPRDRPFVCAPSSKTGSV |
| | TGFBR1 | TTTYCCNQDHCNKIELPTTGLPLLVQRTIARTIVLQESIGKGRFGEVWR |
| | isoform 3 | GKWRGEEVAVKIFSSREERSWFREAEIYQTVMLRHENILGFIAADNKD |
| | (P36897-3) | NGTWTQLWLVSDYHEHGSLFDYLNRYTVTVEGMIKLALSTASGLAH |
| | | LHMEIVGTQGKPAIAHRDLKSKNILVKKNGTCCIADLGLAVRHDSAT |
| | | DTIDIAPNHRVGTKRYMAPEVLDDSINMKHFESFKRADIYAMGLVFW |
| | | EIARRCSIGGIHEDYQLPYYDLVPSDPSVEEMRKVVCEQKLRPNIPNR |
| | | WQSCEALRVMAKIMRECWYANGAARLTALRIKKTLSQLSQQEGIKM |
| SEQ ID | Human | LQCFCHLCTKDNFTCVTDGLCFVSVTETTDKVIHNSMCIAEIDLIPRDR |
| NO: 3122 | TGFBR1 | PFVCAPSSKTGSVTTTYCCNQDHCNKIELPTTGLPLLVQRTIARTIVLQ |
| | isoform 3 | ESIGKGRFGEVWRGKWRGEEVAVKIFSSREERSWFREAEIYQTVMLR |
| | (P36897-3) | HENILGFIAADNKDNGTWTQLWLVSDYHEHGSLFDYLNRYTVTVEG |
| | | MIKLALSTASGLAHLHMEIVGTQGKPAIAHRDLKSKNILVKKNGTCCI |
| | | ADLGLAVRHDSATDTIDIAPNHRVGTKRYMAPEVLDDSINMKHFESF |
| | | KRADIYAMGLVFWEIARRCSIGGIHEDYQLPYYDLVPSDPSVEEMRK |
| | | VVCEQKLRPNIPNRWQSCEALRVMAKIMRECWYANGAARLTALRIK |
| | | KTLSQLSQQEGIKM |
| SEQ ID | Human | LQCFCHLCTKDNFTCVTDGLCFVSVTETTDKVIHNSMCIAEIDLIPRDR |
| NO: 3104 | TGFBR1 | PFVCAPSSKTGSVTTTYCCNQDHCNKIELPTTVKSSPGLGPVEL |
| | fragment 1 | |
| SEQ ID | Human | ALQCFCHLCTKDNFTCVTDGLCFVSVTETTDKVIHNSMCIAEIDLIPRD |
| NO: 3105 | TGFBR1 | RPFVCAPSSKTGSVTTTYCCNQDHCNKIEL |
| | fragment 2 | |
| SEQ ID | Immature | MGRGLLRGLWPLHIVLWTRIASTIPPHVQKSVNNDMIVTDNNGAVKF |
| NO: 3098 | human | PQLCKFCDVRFSTCDNQKSCMSNCSITSICEKPQEVCVAVWRKNDENI |
| | TGFBR2 | TLETVCHDPKLPYHDFILEDAASPKCIMKEKKKPGETFFMCSCSSDEC |
| | isoform B | NDNIIFSEEYNTSNPDLLLVIFQVTGISLLPPLGVAISVIIIFYCYRVNRQ |
| | (short | QKLSSTWETGKTRKLMEFSEHCAIILEDDRSDISSTCANNINHNTELLPI |
| | isoform) | ELDTLVGKGRFAEVYKAKLKQNTSEQFETVAVKIFPYEEYASWKTEK |
| | (P37173-1) | DIFSDINLKHENILQFLTAEERKTELGKQYWLITAFHAKGNLQEYLTR |
| | | HVISWEDLRKLGSSLARGIAHLHSDHTPCGRPKMPIVHRDLKSSNILV |
| | | KNDLTCCLCDFGLSLRLDPTLSVDDLANSGQVGTARYMAPEVLESRM |
| | | NLENVESFKQTDVYSMALVLWEMTSRCNAVGEVKDYEPPFGSKVRE |
| | | HPCVESMKDNVLRDRGRPEIPSFWLNHQGIQMVCETLTECWDHDPEA |
| | | RLTAQCVAERFSELEHLDRLSGRSCSEEKIPEDGSLNTTK |
| SEQ ID | Human | TIPPHVQKSVNNDMIVTDNNGAVKFPQLCKFCDVRFSTCDNQKSCMS |
| NO: 3123 | TGFBR2 | NCSITSICEKPQEVCVAVWRKNDENITLETVCHDPKLPYHDFILEDAAS |
| | isoform B | PKCIMKEKKKPGETFFMCSCSSDECNDNIIFSEEYNTSNPDLLLVIFQV |
| | (short | TGISLLPPLGVAISVIIIFYCYRVNRQQKLSSTWETGKTRKLMEFSEHC |
| | isoform) | AIILEDDRSDISSTCANNINHNTELLPIELDTLVGKGRFAEVYKAKLKQ |
| | (P37173-1) | NTSEQFETVAVKIFPYEEYASWKTEKDIFSDINLKHENILQFLTAEERK |
| | | TELGKQYWLITAFHAKGNLQEYLTRHVISWEDLRKLGSSLARGIAHL |
| | | HSDHTPCGRPKMPIVHRDLKSSNILVKNDLTCCLCDFGLSLRLDPTLS |
| | | VDDLANSGQVGTARYMAPEVLESRMNLENVESFKQTDVYSMALVL |
| | | WEMTSRCNAVGEVKDYEPPFGSKVREHPCVESMKDNVLRDRGRPEIP |
| | | SFWLNHQGIQMVCETLTECWDHDPEARLTAQCVAERFSELEHLDRLS |
| | | GRSCSEEKIPEDGSLNTTK |
| SEQ ID | Immature | MGRGLLRGLWPLHIVLWTRIASTIPPHVQKSDVEMEAQKDEIICPSCN |
| NO: 3099 | human | RTAHPLRHINNDMIVTDNNGAVKFPQLCKFCDVRFSTCDNQKSCMSN |
| | TGFBR2 | CSITSICEKPQEVCVAVWRKNDENITLETVCHDPKLPYHDFILEDAASP |
| | isoform A | KCIMKEKKKPGETFFMCSCSSDECNDNIIFSEEYNTSNPDLLLVIFQVT |
| | (long | GISLLPPLGVAISVIIIFYCYRVNRQQKLSSTWETGKTRKLMEFSEHCAI |
| | isoform) | ILEDDRSDISSTCANNINHNTELLPIELDTLVGKGRFAEVYKAKLKQNT |
| | (P37173-2) | SEQFETVAVKIFPYEEYASWKTEKDIFSDINLKHENILQFLTAEERKTE |
| | | LGKQYWLITAFHAKGNLQEYLTRHVISWEDLRKLGSSLARGIAHLHS |
| | | DHTPCGRPKMPIVHRDLKSSNILVKNDLTCCLCDFGLSLRLDPTLSVD |
| | | DLANSGQVGTARYMAPEVLESRMNLENVESFKQTDVYSMALVLWE |
| | | MTSRCNAVGEVKDYEPPFGSKVREHPCVESMKDNVLRDRGRPEIPSF |
| | | WLNHQGIQMVCETLTECWDHDPEARLTAQCVAERFSELEHLDRLSG |
| | | RSCSEEKIPEDGSLNTTK |
| SEQ ID | Human | TIPPHVQKSDVEMEAQKDEIICPSCNRTAHPLRHINNDMIVTDNNGAV |
| NO: 3124 | TGFBR2 | KFPQLCKFCDVRFSTCDNQKSCMSNCSITSICEKPQEVCVAVWRKND |
| | isoform A | ENITLETVCHDPKLPYHDFILEDAASPKCIMKEKKKPGETFFMCSCSSD |
| | (long | ECNDNIIFSEEYNTSNPDLLLVIFQVTGISLLPPLGVAISVIIIFYCYRVNR |
| | isoform) | QQKLSSTWETGKTRKLMEFSEHCAIILEDDRSDISSTCANNINHNTELL |
| | (P37173-2) | PIELDTLVGKGRFAEVYKAKLKQNTSEQFETVAVKIFPYEEYASWKTE |
| | | KDIFSDINLKHENILQFLTAEERKTELGKQYWLITAFHAKGNLQEYLT |
| | | RHVISWEDLRKLGSSLARGIAHLHSDHTPCGRPKMPIVHRDLKSSNIL |
| | | VKNDLTCCLCDFGLSLRLDPTLSVDDLANSGQVGTARYMAPEVLESR |
| | | MNLENVESFKQTDVYSMALVLWEMTSRCNAVGEVKDYEPPFGSKVR |
| | | EHPCVESMKDNVLRDRGRPEIPSFWLNHQGIQMVCETLTECWDHDPE |
| | | ARLTAQCVAERFSELEHLDRLSGRSCSEEKIPEDGSLNTTK |
| SEQ ID | Human | TIPPHVQKSVNNDMIVTDNNGAVKFPQLCKFCDVRFSTCDNQKSCMS |
| NO: 3100 | TGFBR2 | NCSITSICEKPQEVCVAVWRKNDENITLETVCHDPKLPYHDFILEDAAS |
| | fragment 1 | PKCIMKEKKKPGETFFMCSCSSDECNDNIIFSEEYNTSNPD |
| | (ECD of | |
| | human | |
| | TGFBR2 | |
| | isoform B) | |
| SEQ ID | Human | IPPHVQKSVNNDMIVTDNNGAVKFPQLCKFCDVRFSTCDNQKSCMSN |
| NO: 3101 | TGFBR2 | CSITSICEKPQEVCVAVWRKNDENITLETVCHDPKLPYHDFILEDAASP |
| | fragment 2 | KCIMKEKKKPGETFFMCSCSSDECNDNIIFSEEYNTSNPD |
| SEQ ID | Human | TIPPHVQKSDVEMEAQKDEIICPSCNRTAHPLRHINNDMIVTDNNGAV |
| NO: 3102 | TGFBR2 | KFPQLCKFCDVRFSTCDNQKSCMSNCSITSICEKPQEVCVAVWRKND |
| | fragment 3 | ENITLETVCHDPKLPYHDFILEDAASPKCIMKEKKKPGETFFMCSCSSD |
| | (ECD of | ECNDNIIFSEEYNTSNPD |
| | human | |
| | TGFBR2 | |
| | isoform A) | |
| SEQ ID | Human | QLCKFCDVRFSTCDNQKSCMSNCSITSICEKPQEVCVAVWRKNDENIT |
| NO: 3103 | TGFBR2 | LETVCHDPKLPYHDFILEDAASPKCIMKEKKKPGETFFMCSCSSDECN |
| | fragment 4 | DNIIF |
| SEQ ID | Immature | MTSHYVIAIFALMSSCLATAGPEPGALCELSPVSASHPVQALMESFTV |
| NO: 3106 | human | LSGCASRGTTGLPQEVHVLNLRTAGQGPGQLQREVTLHLNPISSVHIH |
| | TGFBR3 | HKSVVFLLNSPHPLVWHLKTERLATGVSRLFLVSEGSVVQFSSANFSL |
| | isoform 1 | TAETEERNFPHGNEHLLNWARKEYGAVTSFTELKIARNIYIKVGEDQV |
| | (Q03167-1) | FPPKCNIGKNFLSLNYLAEYLQPKAAEGCVMSSQPQNEEVHIIELITPN |
| | | SNPYSAFQVDITIDIRPSQEDLEVVKNLILILKCKKSVNWVIKSFDVKG |
| | | SLKIIAPNSIGFGKESERSMTMTKSIRDDIPSTQGNLVKWALDNGYSPIT |
| | | SYTMAPVANRFHLRLENNAEEMGDEEVHTIPPELRILLDPGALPALQN |
| | | PPIRGGEGQNGGLPFPFPDISRRVWNEEGEDGLPRPKDPVIPSIQLFPGL |
| | | REPEEVQGSVDIALSVKCDNEKMIVAVEKDSFQASGYSGMDVTLLDP |
| | | TCKAKMNGTHFVLESPLNGCGTRPRWSALDGVVYYNSIVIQVPALGD |
| | | SSGWPDGYEDLESGDNGFPGDMDEGDASLFTRPEIVVFNCSLQQVRN |
| | | PSSFQEQPHGNITFNMELYNTDLFLVPSQGVFSVPENGHVYVEVSVTK |
| | | AEQELGFAIQTCFISPYSNPDRMSHYTIIENICPKDESVKFYSPKRVHFPI |
| | | PQADMDKKRFSFVFKPVFNTSLLFLQCELTLCTKMEKHPQKLPKCVPP |
| | | DEACTSLDASIIWAMMQNKKTFTKPLAVIHHEAESKEKGPSMKEPNPI |
| | | SPPIFHGLDTLTVMGIAFAAFVIGALLTGALWYIYSHTGETAGRQQVP |
| | | TSPPASENSSAAHSIGSTQSTPCSSSSTA |
| SEQ ID | Human | GPEPGALCELSPVSASHPVQALMESFTVLSGCASRGTTGLPQEVHVLN |
| NO: 3125 | TGFBR3 | LRTAGQGPGQLQREVTLHLNPISSVHIHHKSVVFLLNSPHPLVWHLKT |
| | isoform 1 | ERLATGVSRLFLVSEGSVVQFSSANFSLTAETEERNFPHGNEHLLNWA |
| | (Q03167-1) | RKEYGAVTSFTELKIARNIYIKVGEDQVFPPKCNIGKNFLSLNYLAEYL |
| | | QPKAAEGCVMSSQPQNEEVHIIELITPNSNPYSAFQVDITIDIRPSQEDL |
| | | EVVKNLILILKCKKSVNWVIKSFDVKGSLKIIAPNSIGFGKESERSMTM |
| | | TKSIRDDIPSTQGNLVKWALDNGYSPITSYTMAPVANRFHLRLENNAE |
| | | EMGDEEVHTIPPELRILLDPGALPALQNPPIRGGEGQNGGLPFPFPDISR |
| | | RVWNEEGEDGLPRPKDPVIPSIQLFPGLREPEEVQGSVDIALSVKCDNE |
| | | KMIVAVEKDSFQASGYSGMDVTLLDPTCKAKMNGTHFVLESPLNGC |
| | | GTRPRWSALDGVVYYNSIVIQVPALGDSSGWPDGYEDLESGDNGFPG |
| | | DMDEGDASLFTRPEIVVFNCSLQQVRNPSSFQEQPHGNITFNMELYNT |
| | | DLFLVPSQGVFSVPENGHVYVEVSVTKAEQELGFAIQTCFISPYSNPDR |
| | | MSHYTIIENICPKDESVKFYSPKRVHFPIPQADMDKKRFSFVFKPVFNT |
| | | SLLFLQCELTLCTKMEKHPQKLPKCVPPDEACTSLDASIIWAMMQNK |
| | | KTFTKPLAVIHHEAESKEKGPSMKEPNPISPPIFHGLDTLTVMGIAFAA |
| | | FVIGALLTGALWYIYSHTGETAGRQQVPTSPPASENSSAAHSIGSTQST |
| | | PCSSSSTA |
| SEQ ID | Immature | MTSHYVIAIFALMSSCLATAGPEPGALCELSPVSASHPVQALMESFTV |
| NO: 3107 | human | LSGCASRGTTGLPQEVHVLNLRTAGQGPGQLQREVTLHLNPISSVHIH |
| | TGFBR3 | HKSVVFLLNSPHPLVWHLKTERLATGVSRLFLVSEGSVVQFSSANFSL |
| | isoform 2 | TAETEERNFPHGNEHLLNWARKEYGAVTSFTELKIARNIYIKVGEDQV |
| | (Q03167-2) | FPPKCNIGKNFLSLNYLAEYLQPKAAEGCVMSSQPQNEEVHIIELITPN |
| | | SNPYSAFQVDITIDIRPSQEDLEVVKNLILILKCKKSVNWVIKSFDVKG |
| | | SLKIIAPNSIGFGKESERSMTMTKSIRDDIPSTQGNLVKWALDNGYSPIT |
| | | SYTMAPVANRFHLRLENNEEMGDEEVHTIPPELRILLDPGALPALQNP |
| | | PIRGGEGQNGGLPFPFPDISRRVWNEEGEDGLPRPKDPVIPSIQLFPGLR |
| | | EPEEVQGSVDIALSVKCDNEKMIVAVEKDSFQASGYSGMDVTLLDPT |
| | | CKAKMNGTHFVLESPLNGCGTRPRWSALDGVVYYNSIVIQVPALGDS |
| | | SGWPDGYEDLESGDNGFPGDMDEGDASLFTRPEIVVFNCSLQQVRNP |
| | | SSFQEQPHGNITFNMELYNTDLFLVPSQGVFSVPENGHVYVEVSVTKA |
| | | EQELGFAIQTCFISPYSNPDRMSHYTIIENICPKDESVKFYSPKRVHFPIP |
| | | QADMDKKRFSFVFKPVFNTSLLFLQCELTLCTKMEKHPQKLPKCVPP |
| | | DEACTSLDASIIWAMMQNKKTFTKPLAVIHHEAESKEKGPSMKEPNPI |
| | | SPPIFHGLDTLTVMGIAFAAFVIGALLTGALWYIYSHTGETAGRQQVP |
| | | TSPPASENSSAAHSIGSTQSTPCSSSSTA |
| SEQ ID | Human | GPEPGALCELSPVSASHPVQALMESFTVLSGCASRGTTGLPQEVHVLN |
| NO: 3126 | TGFBR3 | LRTAGQGPGQLQREVTLHLNPISSVHIHHKSVVFLLNSPHPLVWHLKT |
| | isoform 2 | ERLATGVSRLFLVSEGSVVQFSSANFSLTAETEERNFPHGNEHLLNWA |
| | (Q03167-2) | RKEYGAVTSFTELKIARNIYIKVGEDQVFPPKCNIGKNFLSLNYLAEYL |
| | | QPKAAEGCVMSSQPQNEEVHIIELITPNSNPYSAFQVDITIDIRPSQEDL |
| | | EVVKNLILILKCKKSVNWVIKSFDVKGSLKIIAPNSIGFGKESERSMTM |
| | | TKSIRDDIPSTQGNLVKWALDNGYSPITSYTMAPVANRFHLRLENNEE |
| | | MGDEEVHTIPPELRILLDPGALPALQNPPIRGGEGQNGGLPFPFPDISRR |
| | | VWNEEGEDGLPRPKDPVIPSIQLFPGLREPEEVQGSVDIALSVKCDNEK |
| | | MIVAVEKDSFQASGYSGMDVTLLDPTCKAKMNGTHFVLESPLNGCG |
| | | TRPRWSALDGVVYYNSIVIQVPALGDSSGWPDGYEDLESGDNGFPGD |
| | | MDEGDASLFTRPEIVVFNCSLQQVRNPSSFQEQPHGNITFNMELYNTD |
| | | LFLVPSQGVFSVPENGHVYVEVSVTKAEQELGFAIQTCFISPYSNPDR |
| | | MSHYTIIENICPKDESVKFYSPKRVHFPIPQADMDKKRFSFVFKPVFNT |
| | | SLLFLQCELTLCTKMEKHPQKLPKCVPPDEACTSLDASIIWAMMQNK |
| | | KTFTKPLAVIHHEAESKEKGPSMKEPNPISPPIFHGLDTLTVMGIAFAA |
| | | FVIGALLTGALWYIYSHTGETAGRQQVPTSPPASENSSAAHSIGSTQST |
| | | PCSSSSTA |
| SEQ ID | Human | GPEPGALCELSPVSASHPVQALMESFTVLSGCASRGTTGLPQEVHVLN |
| NO: 3108 | TGFBR3 | LRTAGQGPGQLQREVTLHLNPISSVHIHHKSVVFLLNSPHPLVWHLKT |
| | fragment 1 | ERLATGVSRLFLVSEGSVVQFSSANFSLTAETEERNFPHGNEHLLNWA |
| | | RKEYGAVTSFTELKIARNIYIKVGEDQVFPPKCNIGKNFLSLNYLAEYL |
| | | QPKAAEGCVMSSQPQNEEVHIIELITPNSNPYSAFQVDITIDIRPSQEDL |
| | | EVVKNLILILKCKKSVNWVIKSFDVKGSLKIIAPNSIGFGKESERSMTM |
| | | TKSIRDDIPSTQGNLVKWALDNGYSPITSYTMAPVANRFHLRLENNAE |
| | | EMGDEEVHTIPPELRILLDPGALPALQNPPIRGGEGQNGGLPFPFPDISR |
| | | RVWNEEGEDGLPRPKDPVIPSIQLFPGLREPEEVQGSVDIALSVKCDNE |
| | | KMIVAVEKDSFQASGYSGMDVTLLDPTCKAKMNGTHFVLESPLNGC |
| | | GTRPRWSALDGVVYYNSIVIQVPALGDSSGWPDGYEDLESGDNGFPG |
| | | DMDEGDASLFTRPEIVVFNCSLQQVRNPSSFQEQPHGNITFNMELYNT |
| | | DLFLVPSQGVFSVPENGHVYVEVSVTKAEQELGFAIQTCFISPYSNPDR |
| | | MSHYTIIENICPKDESVKFYSPKRVHFPIPQADMDKKRFSFVFKPVFNT |
| | | SLLFLQCELTLCTKMEKHPQKLPKCVPPDEACTSLDASIIWAMMQNK |
| | | KTFTKPLAVIHHEAESKEKGPSMKEPNPISPPIFHGLDTLTV |
| SEQ ID | hCH1- | ASTKGPSVFPLAPSSKSTSGGTAALGCLVKDYFPEPVTVSWNSGALTS |
| NO: 3192 | hFc_Hole- | GVHTFPAVLQSSGLYSLSSVVTVPSSSLGTQTYICNVNHKPSNTKVDK |
| | 3x4GS- | RVEPKSCDKTHTCPPCPAPELLGGPSVFLFPPKPKDTLMISRTPEVTCV |
| | TGFbR2 | VVDVSHEDPEVKFNWYVDGVEVHNAKTKPREEQYNSTYRVVSVLTV |
| | | LHQDWLNGKEYKCKVSNKALPAPIEKTISKAKGQPREPQVCTLPPSRE |
| | | EMTKNQVSLSCAVKGFYPSDIAVEWESNGQPENNYKTTPPVLDSDGS |
| | | FFLVSKLTVDKSRWQQGNVFSCSVMHEALHNHYTQKSLSLSPGXGG |
| | | GGSGGGGSGGGGSIPPHVQKSVNNDMIVTDNNGAVKFPQLCKFCDV |
| | | RFSTCDNQKSCMSNCSITSICEKPQEVCVAVWRKNDENITLETVCHDP |
| | | KLPYHDFILEDAASPKCIMKEKKKPGETFFMCSCSSDECNDNIIFSEEY |
| | | NTSNPD, wherein X is K or absent |
| SEQ ID | hCH1- | ASTKGPSVFPLAPSSKSTSGGTAALGCLVKDYFPEPVTVSWNSGALTS |
| NO: 3193 | hFc_Knob- | GVHTFPAVLQSSGLYSLSSVVTVPSSSLGTQTYICNVNHKPSNTKVDK |
| | 3x4GS- | RVEPKSCDKTHTCPPCPAPELLGGPSVFLFPPKPKDTLMISRTPEVTCV |
| | TGFbR2 | VVDVSHEDPEVKFNWYVDGVEVHNAKTKPREEQYNSTYRVVSVLTV |
| | | LHQDWLNGKEYKCKVSNKALPAPIEKTISKAKGQPREPQVYTLPPCR |
| | | EEMTKNQVSLWCLVKGFYPSDIAVEWESNGQPENNYKTTPPVLDSDG |
| | | SFFLYSKLTVDKSRWQQGNVFSCSVMHEALHNHYTQKSLSLSPGXGG |
| | | GGSGGGGSGGGGSIPPHVQKSVNNDMIVTDNNGAVKFPQLCKFCDV |
| | | RFSTCDNQKSCMSNCSITSICEKPQEVCVAVWRKNDENITLETVCHDP |
| | | KLPYHDFILEDAASPKCIMKEKKKPGETFFMCSCSSDECNDNIIFSEEY |
| | | NTSNPD, wherein X is K or absent |
| SEQ ID | hFc_Hole- | DKTHTCPPCPAPELLGGPSVFLFPPKPKDTLMISRTPEVTCVVVDVSHE |
| NO: 3194 | 3x4GS- | DPEVKFNWYVDGVEVHNAKTKPREEQYNSTYRVVSVLTVLHQDWL |
| | TGFbR2 | NGKEYKCKVSNKALPAPIEKTISKAKGQPREPQVCTLPPSREEMTKNQ |
| | | VSLSCAVKGFYPSDIAVEWESNGQPENNYKTTPPVLDSDGSFFLVSKL |
| | | TVDKSRWQQGNVFSCSVMHEALHNHYTQKSLSLSPGXGGGGSGGGG |
| | | SGGGGSIPPHVQKSVNNDMIVTDNNGAVKFPQLCKFCDVRFSTCDNQ |
| | | KSCMSNCSITSICEKPQEVCVAVWRKNDENITLETVCHDPKLPYHDFI |
| | | LEDAASPKCIMKEKKKPGETFFMCSCSSDECNDNIIFSEEYNTSNPD, |
| | | wherein X is K or absent |
| SEQ ID | hFc_Knob- | DKTHTCPPCPAPELLGGPSVFLFPPKPKDTLMISRTPEVTCVVVDVSHE |
| NO: 3195 | 3x4GS- | DPEVKFNWYVDGVEVHNAKTKPREEQYNSTYRVVSVLTVLHQDWL |
| | TGFbR2 | NGKEYKCKVSNKALPAPIEKTISKAKGQPREPQVYTLPPCREEMTKNQ |
| | | VSLWCLVKGFYPSDIAVEWESNGQPENNYKTTPPVLDSDGSFFLYSKL |
| | | TVDKSRWQQGNVFSCSVMHEALHNHYTQKSLSLSPGXGGGGSGGGG |
| | | SGGGGSIPPHVQKSVNNDMIVTDNNGAVKFPQLCKFCDVRFSTCDNQ |
| | | KSCMSNCSITSICEKPQEVCVAVWRKNDENITLETVCHDPKLPYHDFI |
| | | LEDAASPKCIMKEKKKPGETFFMCSCSSDECNDNIIFSEEYNTSNPD, |
| | | wherein X is K or absent |
| SEQ ID | TGFbR2- | IPPHVQKSVNNDMIVTDNNGAVKFPQLCKFCDVRFSTCDNQKSCMSN |
| NO: 3196 | 3x4GS- | CSITSICEKPQEVCVAVWRKNDENITLETVCHDPKLPYHDFILEDAASP |
| | hCH1- | KCIMKEKKKPGETFFMCSCSSDECNDNIIFSEEYNTSNPDGGGGSGGG |
| | hFc_Hole | GSGGGGSASTKGPSVFPLAPSSKSTSGGTAALGCLVKDYFPEPVTVSW |
| | | NSGALTSGVHTFPAVLQSSGLYSLSSVVTVPSSSLGTQTYICNVNHKPS |
| | | NTKVDKRVEPKSCDKTHTCPPCPAPELLGGPSVFLFPPKPKDTLMISRT |
| | | PEVTCVVVDVSHEDPEVKFNWYVDGVEVHNAKTKPREEQYNSTYRV |
| | | VSVLTVLHQDWLNGKEYKCKVSNKALPAPIEKTISKAKGQPREPQVC |
| | | TLPPSREEMTKNQVSLSCAVKGFYPSDIAVEWESNGQPENNYKTTPPV |
| | | LDSDGSFFLVSKLTVDKSRWQQGNVFSCSVMHEALHNHYTQKSLSLS |
| | | PGX, wherein X is K or absent |
| SEQ ID | TGFbR2- | IPPHVQKSVNNDMIVTDNNGAVKFPQLCKFCDVRFSTCDNQKSCMSN |
| NO: 3197 | 3x4GS- | CSITSICEKPQEVCVAVWRKNDENITLETVCHDPKLPYHDFILEDAASP |
| | hCH1- | KCIMKEKKKPGETFFMCSCSSDECNDNIIFSEEYNTSNPDGGGGSGGG |
| | hFc_Knob | GSGGGGSASTKGPSVFPLAPSSKSTSGGTAALGCLVKDYFPEPVTVSW |
| | | NSGALTSGVHTFPAVLQSSGLYSLSSVVTVPSSSLGTQTYICNVNHKPS |
| | | NTKVDKRVEPKSCDKTHTCPPCPAPELLGGPSVFLFPPKPKDTLMISRT |
| | | PEVTCVVVDVSHEDPEVKFNWYVDGVEVHNAKTKPREEQYNSTYRV |
| | | VSVLTVLHQDWLNGKEYKCKVSNKALPAPIEKTISKAKGQPREPQVY |
| | | TLPPCREEMTKNQVSLWCLVKGFYPSDIAVEWESNGQPENNYKTTPP |
| | | VLDSDGSFFLYSKLTVDKSRWQQGNVFSCSVMHEALHNHYTQKSLSL |
| | | SPGX, wherein X is K or absent |
| SEQ ID | TGFbR2- | IPPHVQKSVNNDMIVTDNNGAVKFPQLCKFCDVRFSTCDNQKSCMSN |
| NO: 3198 | 3x4GS- | CSITSICEKPQEVCVAVWRKNDENITLETVCHDPKLPYHDFILEDAASP |
| | hCLIg_vl | KCIMKEKKKPGETFFMCSCSSDECNDNIIFSEEYNTSNPDGGGGSGGG |
| | | GSGGGGSGQPKANPTVTLFPPSSEELQANKATLVCLISDFYPGAVTVA |
| | | WKADGSPVKAGVETTKPSKQSNNKYAASSYLSLTPEQWKSHRSYSC |
| | | QVTHEGSTVEKTVAPTECS |
| SEQ ID | TGFβR2- | IPPHVQKSVNNDMIVTDNNGAVKFPQLCKFCDVRFSTCDNQKSCMSN |
| NO: 3199 | 3x4GS- | CSITSICEKPQEVCVAVWRKNDENITLETVCHDPKLPYHDFILEDAASP |
| | hCLIg_vk | KCIMKEKKKPGETFFMCSCSSDECNDNIIFSEEYNTSNPDGGGGSGGG |
| | | GSGGGGSRTVAAPSVFIFPPSDEQLKSGTASVVCLLNNFYPREAKVQW |
| | | KVDNALQSGNSQESVTEQDSKDSTYSLSSTLTLSKADYEKHKVYACE |
| | | VTHQGLSSPVTKSFNRGEC |

### Stromal Modifying Moieties

[0679] Solid tumors have a distinct structure that mimics that of normal tissues and comprises two distinct but interdependent compartments: the parenchyma (neoplastic cells) and the stroma that the neoplastic cells induce and in which they are dispersed. All tumors have stroma and require stroma for nutritional support and for the removal of waste products. In the case of tumors which grow as cell suspensions (e.g., leukemias, ascites tumors), the blood plasma serves as stroma (Connolly J L et al. Tumor Structure and Tumor Stroma Generation. In: Kufe D W et al., editors. Holland-Frei Cancer Medicine. 6th edition. Hamilton: B C Decker; 2003). The stroma includes a variety of cell types, including fibroblasts/myofibroblasts, glial, epithelial, fat, vascular, smooth muscle, and immune cells along with extracellular matrix (ECM) and extracellular molecules (Li Hanchen et al. Tumor Microenvironment: The Role of the Tumor Stroma in Cancer. J of Cellular Biochemistry 101: 805-815 (2007)).

[0680] Stromal modifying moieties described herein include moieties (e.g., proteins, e.g., enzymes) capable of degrading a component of the stroma, e.g., an ECM component, e.g., a glycosaminoglycan, e.g., hyaluronan (also known as hyaluronic acid or HA), chondroitin sulfate, chondroitin, dermatan sulfate, heparin sulfate, heparin, entactin, tenascin, aggrecan and keratin sulfate; or an extracellular protein, e.g., collagen, laminin, elastin, fibrinogen, fibronectin, and vitronectin.

### Stromal Modifying Enzymes

[0681] In some embodiments, the stromal modifying moiety is an enzyme. For example, the stromal modifying moiety can include, but is not limited to a hyaluronidase, a collagenase, a chondroitinase, a matrix metalloproteinase (e.g., macrophage metalloelastase).

[0682] Hyaluronidases

[0683] Hyaluronidases are a group of neutral- and acid-active enzymes found throughout the animal kingdom. Hyaluronidases vary with respect to substrate specificity, and mechanism of action. There are three general classes of hyaluronidases: (1) Mammalian-type hyaluronidases, (EC 3.2.1.35) which are endo-beta-N-acetylhexosaminidases with tetrasaccharides and hexasaccharides as the major end products. They have both hydrolytic and transglycosidase activities, and can degrade hyaluronan and chondroitin sulfates; (2) Bacterial hyaluronidases (EC 4.2.99.1) degrade hyaluronan and, and to various extents, chondroitin sulfate and dermatan sulfate. They are endo-beta-N-acetylhexosaminidases that operate by a beta elimination reaction that yields primarily disaccharide end products; (3) Hyaluronidases (EC 3.2.1.36) from leeches, other parasites, and crustaceans are endo-beta-glucuronidases that generate tetrasaccharide and hexasaccharide end products through hydrolysis of the beta 1-3 linkage.

[0684] Mammalian hyaluronidases can be further divided into two groups: (1) neutral active and (2) acid active enzymes. There are six hyaluronidase-like genes in the human genome, HYAL1, HYAL2, HYAL3 HYAL4 HYALP1 and PH20/SPAM1. HYALP1 is a pseudogene, and HYAL3 has not been shown to possess enzyme activity toward any known substrates. HYAL4 is a chondroitinase and lacks activity towards hyaluronan. HYAL1 is the prototypical acid-active enzyme and PH20 is the prototypical neutral-active enzyme. Acid active hyaluronidases, such as HYAL1 and HYAL2 lack catalytic activity at neutral pH. For example, HYAL1 has no catalytic activity in vitro over pH 4.5 (Frost and Stern, “A Microtiter-Based Assay for Hyaluronidase Activity Not Requiring Specialized Reagents”, Analytical Biochemistry, vol. 251, pp. 263-269 (1997). HYAL2 is an acid active enzyme with a very low specific activity in vitro.

[0685] In some embodiments the hyaluronidase is a mammalian hyaluronidase. In some embodiments the hyaluronidase is a recombinant human hyaluronidase. In some embodiments, the hyaluronidase is a neutral active hyaluronidase. In some embodiments, the hyaluronidase is a neutral active soluble hyaluronidase. In some embodiments, the hyaluronidase is a recombinant PH20 neutral-active enzyme. In some embodiments, the hyaluronidase is a recombinant PH20 neutral-active soluble enzyme. In some embodiments the hyaluronidase is glycosylated. In some embodiments, the hyaluronidase possesses at least one N-linked glycan. A recombinant hyaluronidase can be produced using conventional methods known to those of skill in the art, e.g., U.S. Pat. No. 7,767,429, the entire contents of which are incorporated by reference herein.

[0686] In some embodiments the hyaluronidase is rHuPH20 (also referred to as Hylenex®; presently manufactured by Halozyme; approved by the FDA in 2005 (see e.g., Scodeller P (2014) Hyaluronidase and other Extracellular Matrix Degrading Enzymes for Cancer Therapy: New Uses and Nano-Formulations. J Carcinog Mutage 5:178; U.S. Pat. Nos. 7,767,429; 8,202,517; 7,431,380; 8,450,470; 8,772,246; 8,580,252, the entire contents of each of which is incorporated by reference herein). rHuPH20 is produced by genetically engineered CHO cells containing a DNA plasmid encoding for a soluble fragment of human hyaluronidase PH20. In some embodiments the hyaluronidase is glycosylated. In some embodiments, the hyaluronidase possesses at least one N-linked glycan. A recombinant hyaluronidase can be produced using conventional methods known to those of skill in the art, e.g., U.S. Pat. No. 7,767,429, the entire contents of which are incorporated by reference herein. In some embodiments, rHuPH20 has a sequence at least 95% (e.g., at least 96%, 97%, 98%, 99%, 100%) identical to the amino acid sequence of

(SEQ ID NO: 39)
LNFRAPPVIPNVPFLWAWNAPSEFCLGKFDEPLDMSLFSFIGSPRINATG
QGVTIFYVDRLGYYPYIDSITGVTVNGGIPQKISLQDHLDKAKKDITFYM
PVDNLGMAVIDWEEWRPTWARNWKPKDVYKNRSIELVQQQNVQLSLTEAT
EKAKQEFEKAGKDFLVETIKLGKLLRPNHLWGYYLFPDCYNHHYKKPGYN
GSCFNVEIKRNDDLSWLWNESTALYPSIYLNTQQSPVAATLYVRNRVREA
IRVSKIPDAKSPLPVFAYTRIVFTDQVLKFLSQDELVYTFGETVALGASG
IVIWGTLSIMRSMKSCLLLDNYMETILNPYIINVTLAAKMCSQVLCQEQG
VCIRKNWNSSDYLHLNPDNFAIQLEKGGKFTVRGKPTLEDLEQFSEKFYC
SCYSTLSCKEKADVKDTDAVDVCIADGVCIDAFLKPPMETEEPQIFYNAS
PSTLS.

[0687] In any of the methods provided herein, the anti-hyaluronan agent can be an agent that degrades hyaluronan or can be an agent that inhibits the synthesis of hyaluronan. For example, the anti-hyaluronan agent can be a hyaluronan degrading enzyme. In another example, the anti-hyaluronan agent or is an agent that inhibits hyaluronan synthesis. For example, the anti-hyaluronan agent is an agent that inhibits hyaluronan synthesis such as a sense or antisense nucleic acid molecule against an HA synthase or is a small molecule drug. For example, an anti-hyaluronan agent is 4-methylumbelliferone (MU) or a derivative thereof, or leflunomide or a derivative thereof. Such derivatives include, for example, a derivative of 4-methylumbelliferone (MU) that is 6,7-dihydroxy-4-methyl coumarin or 5,7-dihydroxy-4-methyl coumarin.

[0688] In further examples of the methods provided herein, the hyaluronan degrading enzyme is a hyaluronidase. In some examples, the hyaluronan-degrading enzyme is a PH20 hyaluronidase or truncated form thereof to lacking a C-terminal glycosylphosphatidylinositol (GPI) attachment site or a portion of the GPI attachment site. In specific examples, the hyaluronidase is a PH20 selected from a human, monkey, bovine, ovine, rat, mouse or guinea pig PH20. For example, the hyaluronan-degrading enzyme is a human PH20 hyaluronidase that is neutral active and N-glycosylated and is selected from among (a) a hyaluronidase polypeptide that is a full-length PH20 or is a C-terminal truncated form of the PH20, wherein the truncated form includes at least amino acid residues 36-464 of SEQ ID NO: 39, such as 36-481, 36-482, 36-483, where the full-length PH20 has the sequence of amino acids set forth in SEQ ID NO: 39; or (b) a hyaluronidase polypeptide comprising a sequence of amino acids having at least 85%, 86%, 87%, 88%, 89%, 90%, 91%, 92%, 93%, 94%, 95%, 96%, 97%, 98%, 99% or more sequence identity with the polypeptide or truncated form of sequence of amino acids set forth in SEQ ID NO: 39; or (c) a hyaluronidase polypeptide of (a) or (b) comprising amino acid substitutions, whereby the hyaluronidase polypeptide has a sequence of amino acids having at least 85%, 86%, 87%, 88%, 89%, 90%, 91%, 92%, 93%, 94%, 95%, 96%, 97%, 98%, 99% or more sequence identity with the polypeptide set forth in SEQ ID NO: 39 or the with the corresponding truncated forms thereof. In exemplary examples, the hyaluronan-degrading enzyme is a PH20 that comprises a composition designated rHuPH20.

[0689] In other examples, the anti-hyaluronan agent is a hyaluronan degrading enzyme that is modified by conjugation to a polymer. The polymer can be a PEG and the anti-hyaluronan agent a PEGylated hyaluronan degrading enzyme. Hence, in some examples of the methods provided herein the hyaluronan-degrading enzyme is modified by conjugation to a polymer. For example, the hyaluronan-degrading enzyme is conjugated to a PEG, thus the hyaluronan degrading enzyme is PEGylated. In an exemplary example, the hyaluronan-degrading enzyme is a PEGylated PH20 enzyme (PEGPH20). In the methods provided herein, the corticosteroid can be a glucocorticoid that is selected from among cortisones, dexamethasones, hydrocortisones, methylprednisolones, prednisolones and prednisones.

[0690] Chondroitinases

[0691] Chondroitinases are enzymes found throughout the animal kingdom which degrade glycosaminoglycans, specifically chondroitins and chondroitin sulfates, through an endoglycosidase reaction. In some embodiments the chondroitinase is a mammalian chondroitinase. In some embodiments the chondroitinase is a recombinant human chondroitinase. In some embodiments the chondroitinase is HYAL4. Other exemplary chondroitinases include chondroitinase ABC (derived from Proteus vulgaris; Japanese Patent Application Laid-open No 6-153947, T. Yamagata et al. J. Biol. Chem., 243, 1523 (1968), S. Suzuki et al, J. Biol. Chem., 243, 1543 (1968)), chondroitinase AC (derived from Flavobacterium heparinum; T. Yamagata et al., J. Biol. Chem., 243, 1523 (1968)), chondroitinase AC II (derived from Arthrobacter aurescens; K. Hiyama, and S. Okada, J. Biol. Chem., 250, 1824 (1975), K. Hiyama and S. Okada, J. Biochem. (Tokyo), 80, 1201 (1976)), Hyaluronidase ACIII (derived from Flavobacterium sp. Hp102; Hirofumi Miyazono et al., Seikagaku, 61, 1023 (1989)), chondroitinase B (derived from Flavobacterium heparinum; Y. M. Michelacci and C. P. Dietrich, Biochem. Biophys. Res. Commun., 56, 973 (1974), Y. M. Michelacci and C. P. Dietrich, Biochem. J., 151, 121 (1975), Kenichi Maeyama et al, Seikagaku, 57, 1189 (1985)), chondroitinase C (derived from Flavobacterium sp. Hp102; Hirofumi Miyazono et al, Seikagaku, 61, 1023 (1939)), and the like.

[0692] Matrix Metalloproteinases

[0693] Matrix metalloproteases (MMPs) are zinc-dependent endopeptidases that are the major proteases involved in extracellular matrix (ECM) degradation. MMPs are capable of degrading a wide range of extracellular molecules and a number of bioactive molecules. Twenty-four MMP genes have been identified in humans, which can be organized into six groups based on domain organization and substrate preference: Collagenases (MMP-1, -8 and -13), Gelatinases (MMP-2 and MMP-9), Stromelysins (MMP-3, -10 and -11), Matrilysin (MMP-7 and MMP-26), Membrane-type (MT)-MMPs (MMP-14, -15, -16, -17, -24 and -25) and others (MMP-12, -19, -20, -21, -23, -27 and -28). In some embodiments, the stromal modifying moiety is a human recombinant MMP (e.g., MMP-1, -2, -3, -4, -5, -6, -7, -8, -9, 10, -11, -12, -13, -14, 15, -15, -17, -18, -19, 20, -21, -22, -23, or -24).

[0694] Collagenases

[0695] The three mammalian collagenases (MMP-1, -8, and -13) are the principal secreted endopeptidases capable of cleaving collagenous extracellular matrix. In addition to fibrillar collagens, collagenases can cleave several other matrix and non-matrix proteins including growth factors. Collagenases are synthesized as inactive pro-forms, and once activated, their activity is inhibited by specific tissue inhibitors of metalloproteinases, TIMPs, as well as by non-specific proteinase inhibitors (Ala-aho R et al. Biochimie. Collagenases in cancer. 2005 March-April; 87(3-4):273-86). In some embodiments, the stromal modifying moiety is a collagenase. In some embodiments, the collagenase is a human recombinant collagenase. In some embodiments, the collagenase is MMP-1. In some embodiments, the collagenase is MMP-8. In some embodiments, the collagenase is MMP-13.

[0696] Macrophage Metalloelastase

[0697] Macrophage metalloelastase (MME), also known as MMP-12, is a member of the stromelysin subgroup of MMPs and catalyzes the hydrolysis of soluble and insoluble elastin and a broad selection of matrix and nonmatrix substrates including type IV collagen, fibronectin, laminin, vitronectin, entactin, heparan, and chondroitin sulfates (Erja Kerkela et al. Journal of Investigative Dermatology (2000) 114, 1113-1119; doi:10.1046/j.1523-1747.2000.00993). In some embodiments, the stromal modifying moiety is a MME. In some embodiments, the MME is a human recombinant MME. In some embodiments, the MME is MMP-12.

[0698] Additional Stromal Modifying Moieties

[0699] In some embodiments, the stromal modifying moiety causes one or more of: decreases the level or production of a stromal or extracellular matrix (ECM) component; decreases tumor fibrosis; increases interstitial tumor transport; improves tumor perfusion; expands the tumor microvasculature; decreases interstitial fluid pressure (IFP) in a tumor; or decreases or enhances penetration or diffusion of an agent, e.g., a cancer therapeutic or a cellular therapy, into a tumor or tumor vasculature.

[0700] In some embodiments, the stromal or ECM component decreased is chosen from a glycosaminoglycan or an extracellular protein, or a combination thereof. In some embodiments, the glycosaminoglycan is chosen from hyaluronan (also known as hyaluronic acid or HA), chondroitin sulfate, chondroitin, dermatan sulfate, heparin, heparin sulfate, entactin, tenascin, aggrecan and keratin sulfate. In some embodiments, the extracellular protein is chosen from collagen, laminin, elastin, fibrinogen, fibronectin, or vitronectin. In some embodiments, the stromal modifying moiety includes an enzyme molecule that degrades a tumor stroma or extracellular matrix (ECM). In some embodiments, the enzyme molecule is chosen from a hyaluronidase molecule, a collagenase molecule, a chondroitinase molecule, a matrix metalloproteinase molecule (e.g., macrophage metalloelastase), or a variant (e.g., a fragment) of any of the aforesaid. The term “enzyme molecule” includes a full length, a fragment or a variant of the enzyme, e.g., an enzyme variant that retains at least one functional property of the naturally-occurring enzyme.

[0701] In some embodiments, the stromal modifying moiety decreases the level or production of hyaluronic acid. In other embodiments, the stromal modifying moiety comprises a hyaluronan degrading enzyme, an agent that inhibits hyaluronan synthesis, or an antibody molecule against hyaluronic acid.

[0702] In some embodiments, the hyaluronan degrading enzyme is a hyaluronidase molecule, e.g., a full length or a variant (e.g., fragment thereof) thereof. In some embodiments, the hyaluronan degrading enzyme is active in neutral or acidic pH, e.g., pH of about 4-5. In some embodiments, the hyaluronidase molecule is a mammalian hyaluronidase molecule, e.g., a recombinant human hyaluronidase molecule, e.g., a full length or a variant (e.g., fragment thereof, e.g., a truncated form) thereof. In some embodiments, the hyaluronidase molecule is chosen from HYAL1, HYAL2, or PH-20/SPAM1, or a variant thereof (e.g., a truncated form thereof). In some embodiments, the truncated form lacks a C-terminal glycosylphosphatidylinositol (GPI) attachment site or a portion of the GPI attachment site. In some embodiments, the hyaluronidase molecule is glycosylated, e.g., comprises at least one N-linked glycan.

[0703] In some embodiments, the hyaluronidase molecule comprises the amino acid sequence: LNFRAPPVIPNVPFLWAWNAPSEFCLGKFDEPLDMSLFSFIGSPRINATGQGVTIFYVDRLGYYPYIDS ITGVTVNGGIPQKISLQDHLDKAKKDITFYMPVDNLGMAVIDWEEWRPTWARNWKPKDVYKNRSI ELVQQQNVQLSLTEATEKAKQEFEKAGKDFLVETIKLGKLLRPNHLWGYYLFPDCYNHHYKKPGY NGSCFNVEIKRNDDLSWLWNESTALYPSIYLNTQQSPVAATLYVRNRVREAIRVSKIPDAKSPLPVF AYTRIVFTDQVLKFLSQDELVYTFGETVALGASGIVIWGTLSIMRSMKSCLLLDNYMETILNPYIINV TLAAKMCSQVLCQEQGVCIRKNWNSSDYLHLNPDNFAIQLEKGGKFTVRGKPTLEDLEQFSEKFYC SCYSTLSCKEKADVKDTDAVDVCIADGVCIDAFLKPPMETEEPQIFYNASPSTLS (SEQ ID NO:61), or a fragment thereof, or an amino acid sequence substantially identical thereto (e.g., 95% to 99.9% identical thereto, or having at least one amino acid alteration, but not more than five, ten or fifteen alterations (e.g., substitutions, deletions, or insertions, e.g., conservative substitutions) to the amino acid sequence of SEQ ID NO: 61.

[0704] In some embodiments, the hyaluronidase molecule comprises:

(i) the amino acid sequence of 36-464 of SEQ ID NO: 61;
(ii) the amino acid sequence of 36-481, 36-482, or 36-483 of PH20, wherein PH20 has the sequence of amino acids set forth in SEQ ID NO: 61; or
(iii) an amino acid sequence having at least 95% to 100% sequence identity to the polypeptide or truncated form of sequence of amino acids set forth in SEQ ID NO: 61; or
(iv) an amino acid sequence having 30, 20, 10, 5 or fewer amino acid substitutions to the amino acid sequence set forth in SEQ ID NO: 61. In some embodiments, the hyaluronidase molecule comprises an amino acid sequence at least 95% (e.g., at least 95%, 96%, 97%, 98%, 99%, 100%) identical to the amino acid sequence of SEQ ID NO: 61. In some embodiments, the hyaluronidase molecule is encoded by a nucleotide sequence at least 95% (e.g., at least 96%, 97%, 98%, 99%, 100%) identical to the nucleotide sequence of SEQ ID NO: 61.

[0705] In some embodiments, the hyaluronidase molecule is PH20, e.g., rHuPH20. In some embodiments, the hyaluronidase molecule is HYAL1 and comprises the amino acid sequence: FRGPLLPNRPFTTVWNANTQWCLERHGVDVDVSVFDVVANPGQTFRGPDMTIFYSSQGTYPYYTPT GEPVFGGLPQNASLIAHLARTFQDILAAIPAPDFSGLAVIDWEAWRPRWAFNWDTKDIYRQRSRAL VQAQHPDWPAPQVEAVAQDQFQGAARAWMAGTLQLGRALRPRGLWGFYGFPDCYNYDFLSPNY TGQCPSGIRAQNDQLGWLWGQSRALYPSIYMPAVLEGTGKSQMYVQHRVAEAFRVAVAAGDPNL PVLPYVQIFYDTTNHFLPLDELEHSLGESAAQGAAGVVLWVSWENTRTKESCQAIKEYMDTTLGPFI LNVTSGALLCSQALCSGHGRCVRRTSHPKALLLLNPASFSIQLTPGGGPLSLRGALSLEDQAQMAVE FKCRCYPGWQAPWCERKSMW (SEQ ID NO: 62), or a fragment thereof, or an amino acid sequence substantially identical thereto (e.g., 95% to 99.9% identical thereto, or having at least one amino acid alteration, but not more than five, ten or fifteen alterations (e.g., substitutions, deletions, or insertions, e.g., conservative substitutions) to the amino acid sequence of SEQ ID NO: 62.

[0706] In some embodiments, the hyaluronan degrading enzyme, e.g., the hyaluronidase molecule, further comprises a polymer, e.g., is conjugated to a polymer, e.g., PEG. In some embodiments, the hyaluronan-degrading enzyme is a PEGylated PH20 enzyme (PEGPH20). In some embodiments, the hyaluronan degrading enzyme, e.g., the hyaluronidase molecule, further comprises an immunoglobulin chain constant region (e.g., Fc region) chosen from, e.g., the heavy chain constant regions of IgG1, IgG2, IgG3, and IgG4, more particularly, the heavy chain constant region of human IgG1, IgG2, IgG3, or IgG4. In some embodiments, the immunoglobulin constant region (e.g., the Fc region) is linked, e.g., covalently linked to, the hyaluronan degrading enzyme, e.g., the hyaluronidase molecule. In some embodiments, the immunoglobulin chain constant region (e.g., Fc region) is altered, e.g., mutated, to increase or decrease one or more of: Fc receptor binding, antibody glycosylation, the number of cysteine residues, effector cell function, or complement function. In some embodiments, the hyaluronan degrading enzyme, e.g., the hyaluronidase molecule forms a dimer.

[0707] In some embodiments, the stromal modifying moiety comprises an inhibitor of the synthesis of hyaluronan, e.g., an HA synthase. In some embodiments, the inhibitor comprises a sense or an antisense nucleic acid molecule against an HA synthase or is a small molecule drug. In some embodiments, the inhibitor is 4-methylumbelliferone (MU) or a derivative thereof (e.g., 6,7-dihydroxy-4-methyl coumarin or 5,7-dihydroxy-4-methyl coumarin), or leflunomide or a derivative thereof.

[0708] In some embodiments, the stromal modifying moiety comprises antibody molecule against hyaluronic acid.

[0709] In some embodiments, the stromal modifying moiety comprises a collagenase molecule, e.g., a mammalian collagenase molecule, or a variant (e.g., fragment) thereof. In some embodiments, the collagenase molecule is collagenase molecule IV, e.g., comprising the amino acid sequence of: YNFFPRKPKWDKNQITYRIIGYTPDLDPETVDDAFARAFQVWSDVTPLRFSRIHDGEADIMINFGRW EHGDGYPFDGKDGLLAHAFAPGTGVGGDSHFDDDELWTLGEGQVVRVKYGNADGEYCKFPFLFN GKEYNSCTDTGRSDGFLWCSTTYNFEKDGKYGFCPHEALFTMGGNAEGQPCKFPFRFQGTSYDSCT TEGRTDGYRWCGTTEDYDRDKKYGFCPETAMSTVGGNSEGAPCVFPFTFLGNKYESCTSAGRSDG KMWCATTANYDDDRKWGFCPDQGYSLFLVAAHEFGHAMGLEHSQDPGALMAPIYTYTKNFRLSQ DDIKGIQELYGASPDIDLGTGPTPTLGPVTPEICKQDIVFDGIAQIRGEIFFFKDRFIWRTVTPRDKPMG PLLVATFWPELPEKIDAVYEAPQEEKAVFFAGNEYWIYSASTLERGYPKPLTSLGLPPDVQRVDAAF NWSKNKKTYIFAGDKFWRYNEVKKKMDPGFPKLIADAWNAIPDNLDAVVDLQGGGHSYFFKGAY YLKLENQSLKSVKFGSIKSDWLGC (SEQ ID NO: 63), or a fragment thereof, or an amino acid sequence substantially identical thereto (e.g., 95% to 99.9% identical thereto, or having at least one amino acid alteration, but not more than five, ten or fifteen alterations (e.g., substitutions, deletions, or insertions, e.g., conservative substitutions) to the amino acid sequence of SEQ ID NO: 63.

### Linkers

[0710] The multispecific or multifunctional molecule disclosed herein can further include a linker, e.g., a linker between one or more of: the antigen binding domain and the cytokine molecule, the antigen binding domain and the immune cell engager, the antigen binding domain and the stromal modifying moiety, the cytokine molecule and the immune cell engager, the cytokine molecule and the stromal modifying moiety, the immune cell engager and the stromal modifying moiety, the antigen binding domain and the immunoglobulin chain constant region, the cytokine molecule and the immunoglobulin chain constant region, the immune cell engager and the immunoglobulin chain constant region, or the stromal modifying moiety and the immunoglobulin chain constant region. In embodiments, the linker is chosen from: a cleavable linker, a non-cleavable linker, a peptide linker, a flexible linker, a rigid linker, a helical linker, or a non-helical linker, or a combination thereof.

[0711] In one embodiment, the multispecific molecule can include one, two, three or four linkers, e.g., a peptide linker. In one embodiment, the peptide linker includes Gly and Ser. In some embodiments, the peptide linker is selected from GGGGS (SEQ ID NO: 42); GGGGSGGGGS (SEQ ID NO: 43); GGGGSGGGGSGGGGS (SEQ ID NO: 44); and DVPSGPGGGGGSGGGGS (SEQ ID NO: 45). In some embodiments, the peptide linker is a A(EAAAK)nA family of linkers (SEQ ID NO: 310) (e.g., as described in Protein Eng. (2001) 14 (8): 529-532). These are stiff helical linkers with n ranging from 2-5. In some embodiments, the peptide linker is selected from AEAAAKEAAAKAAA (SEQ ID NO: 75); AEAAAKEAAAKEAAAKAAA (SEQ ID NO: 76); AEAAAKEAAAKEAAAKEAAAKAAA (SEQ ID NO: 77); and AEAAAKEAAAKEAAAKEAAAKEAAAKAAA(SEQ ID NO: 78).

### Nucleic Acids

[0712] Nucleic acids encoding the aforementioned multispecific or multifunctional molecules are also disclosed.

[0713] In certain embodiments, the invention features nucleic acids comprising nucleotide sequences that encode heavy and light chain variable regions and CDRs or hypervariable loops of the antibody molecules, as described herein. For example, the invention features a first and second nucleic acid encoding heavy and light chain variable regions, respectively, of an antibody molecule chosen from one or more of the antibody molecules disclosed herein. The nucleic acid can comprise a nucleotide sequence as set forth in the tables herein, or a sequence substantially identical thereto (e.g., a sequence at least about 85%, 90%, 95%, 99% or more identical thereto, or which differs by no more than 3, 6, 15, 30, or 45 nucleotides from the sequences shown in the tables herein.

[0714] In certain embodiments, the nucleic acid can comprise a nucleotide sequence encoding at least one, two, or three CDRs or hypervariable loops from a heavy chain variable region having an amino acid sequence as set forth in the tables herein, or a sequence substantially homologous thereto (e.g., a sequence at least about 85%, 90%, 95%, 99% or more identical thereto, and/or having one or more substitutions, e.g., conserved substitutions). In other embodiments, the nucleic acid can comprise a nucleotide sequence encoding at least one, two, or three CDRs or hypervariable loops from a light chain variable region having an amino acid sequence as set forth in the tables herein, or a sequence substantially homologous thereto (e.g., a sequence at least about 85%, 90%, 95%, 99% or more identical thereto, and/or having one or more substitutions, e.g., conserved substitutions). In yet another embodiment, the nucleic acid can comprise a nucleotide sequence encoding at least one, two, three, four, five, or six CDRs or hypervariable loops from heavy and light chain variable regions having an amino acid sequence as set forth in the tables herein, or a sequence substantially homologous thereto (e.g., a sequence at least about 85%, 90%, 95%, 99% or more identical thereto, and/or having one or more substitutions, e.g., conserved substitutions).

[0715] In certain embodiments, the nucleic acid can comprise a nucleotide sequence encoding at least one, two, or three CDRs or hypervariable loops from a heavy chain variable region having the nucleotide sequence as set forth in the tables herein, a sequence substantially homologous thereto (e.g., a sequence at least about 85%, 90%, 95%, 99% or more identical thereto, and/or capable of hybridizing under the stringency conditions described herein). In another embodiment, the nucleic acid can comprise a nucleotide sequence encoding at least one, two, or three CDRs or hypervariable loops from a light chain variable region having the nucleotide sequence as set forth in the tables herein, or a sequence substantially homologous thereto (e.g., a sequence at least about 85%, 90%, 95%, 99% or more identical thereto, and/or capable of hybridizing under the stringency conditions described herein). In yet another embodiment, the nucleic acid can comprise a nucleotide sequence encoding at least one, two, three, four, five, or six CDRs or hypervariable loops from heavy and light chain variable regions having the nucleotide sequence as set forth in the tables herein, or a sequence substantially homologous thereto (e.g., a sequence at least about 85%, 90%, 95%, 99% or more identical thereto, and/or capable of hybridizing under the stringency conditions described herein).

[0716] In certain embodiments, the nucleic acid can comprise a nucleotide sequence encoding a cytokine molecule, an immune cell engager, or a stromal modifying moiety disclosed herein.

[0717] In another aspect, the application features host cells and vectors containing the nucleic acids described herein. The nucleic acids may be present in a single vector or separate vectors present in the same host cell or separate host cell, as described in more detail hereinbelow.

### Vectors

[0718] Further provided herein are vectors comprising the nucleotide sequences encoding a multispecific or multifunctional molecule described herein. In one embodiment, the vectors comprise nucleotides encoding a multispecific or multifunctional molecule described herein. In one embodiment, the vectors comprise the nucleotide sequences described herein. The vectors include, but are not limited to, a virus, plasmid, cosmid, lambda phage or a yeast artificial chromosome (YAC).

[0719] Numerous vector systems can be employed. For example, one class of vectors utilizes DNA elements which are derived from animal viruses such as, for example, bovine papilloma virus, polyoma virus, adenovirus, vaccinia virus, baculovirus, retroviruses (Rous Sarcoma Virus, MMTV or MOMLV) or SV40 virus. Another class of vectors utilizes RNA elements derived from RNA viruses such as Semliki Forest virus, Eastern Equine Encephalitis virus and Flaviviruses.

[0720] Additionally, cells which have stably integrated the DNA into their chromosomes may be selected by introducing one or more markers which allow for the selection of transfected host cells. The marker may provide, for example, prototropy to an auxotrophic host, biocide resistance (e.g., antibiotics), or resistance to heavy metals such as copper, or the like. The selectable marker gene can be either directly linked to the DNA sequences to be expressed, or introduced into the same cell by cotransformation. Additional elements may also be needed for optimal synthesis of mRNA. These elements may include splice signals, as well as transcriptional promoters, enhancers, and termination signals.

[0721] Once the expression vector or DNA sequence containing the constructs has been prepared for expression, the expression vectors may be transfected or introduced into an appropriate host cell. Various techniques may be employed to achieve this, such as, for example, protoplast fusion, calcium phosphate precipitation, electroporation, retroviral transduction, viral transfection, gene gun, lipid based transfection or other conventional techniques. In the case of protoplast fusion, the cells are grown in media and screened for the appropriate activity. Methods and conditions for culturing the resulting transfected cells and for recovering the antibody molecule produced are known to those skilled in the art, and may be varied or optimized depending upon the specific expression vector and mammalian host cell employed, based upon the present description.

### Cells

[0722] In another aspect, the application features host cells and vectors containing the nucleic acids described herein. The nucleic acids may be present in a single vector or separate vectors present in the same host cell or separate host cell. The host cell can be a eukaryotic cell, e.g., a mammalian cell, an insect cell, a yeast cell, or a prokaryotic cell, e.g., E. coli. For example, the mammalian cell can be a cultured cell or a cell line. Exemplary mammalian cells include lymphocytic cell lines (e.g., NSO), Chinese hamster ovary cells (CHO), COS cells, oocyte cells, and cells from a transgenic animal, e.g., mammary epithelial cell.

[0723] The invention also provides host cells comprising a nucleic acid encoding an antibody molecule as described herein.

[0724] In one embodiment, the host cells are genetically engineered to comprise nucleic acids encoding the antibody molecule.

[0725] In one embodiment, the host cells are genetically engineered by using an expression cassette. The phrase “expression cassette,” refers to nucleotide sequences, which are capable of affecting expression of a gene in hosts compatible with such sequences. Such cassettes may include a promoter, an open reading frame with or without introns, and a termination signal. Additional factors necessary or helpful in effecting expression may also be used, such as, for example, an inducible promoter.

[0726] The invention also provides host cells comprising the vectors described herein.

[0727] The cell can be, but is not limited to, a eukaryotic cell, a bacterial cell, an insect cell, or a human cell. Suitable eukaryotic cells include, but are not limited to, Vero cells, HeLa cells, COS cells, CHO cells, HEK293 cells, BHK cells and MDCKII cells. Suitable insect cells include, but are not limited to, Sf9 cells.

### Uses and Combination Therapies

[0728] Methods described herein include treating a cancer in a subject by using a multispecific or multifunctional molecule described herein, e.g., using a pharmaceutical composition described herein. Also provided are methods for reducing or ameliorating a symptom of a cancer in a subject, as well as methods for inhibiting the growth of a cancer and/or killing one or more cancer cells. In embodiments, the methods described herein decrease the size of a tumor and/or decrease the number of cancer cells in a subject administered with a described herein or a pharmaceutical composition described herein.

[0729] In embodiments, the cancer is a hematological cancer. In embodiments, the hematological cancer is a leukemia or a lymphoma. As used herein, a “hematologic cancer” refers to a tumor of the hematopoietic or lymphoid tissues, e.g., a tumor that affects blood, bone marrow, or lymph nodes. Exemplary hematologic malignancies include, but are not limited to, leukemia (e.g., acute lymphoblastic leukemia (ALL), acute myeloid leukemia (AML), chronic lymphocytic leukemia (CLL), chronic myelogenous leukemia (CML), hairy cell leukemia, acute monocytic leukemia (AMoL), chronic myelomonocytic leukemia (CMML), juvenile myelomonocytic leukemia (JMML), or large granular lymphocytic leukemia), lymphoma (e.g., AIDS-related lymphoma, cutaneous T-cell lymphoma, Hodgkin lymphoma (e.g., classical Hodgkin lymphoma or nodular lymphocyte-predominant Hodgkin lymphoma), mycosis fungoides, non-Hodgkin lymphoma (e.g., B-cell non-Hodgkin lymphoma (e.g., Burkitt lymphoma, small lymphocytic lymphoma (CLL/SLL), diffuse large B-cell lymphoma, follicular lymphoma, immunoblastic large cell lymphoma, precursor B-lymphoblastic lymphoma, or mantle cell lymphoma) or T-cell non-Hodgkin lymphoma (mycosis fungoides, anaplastic large cell lymphoma, or precursor T-lymphoblastic lymphoma)), primary central nervous system lymphoma, Sézary syndrome, Waldenström macroglobulinemia), chronic myeloproliferative neoplasm, Langerhans cell histiocytosis, multiple myeloma/plasma cell neoplasm, myelodysplastic syndrome, or myelodysplastic/myeloproliferative neoplasm.

[0730] In embodiments, the cancer is a myeloproliferative neoplasm, e.g., primary or idiopathic myelofibrosis (MF), essential thrombocytosis (ET), polycythemia vera (PV), or chronic myelogenous leukemia (CML). In embodiments, the cancer is myelofibrosis. In embodiments, the subject has myelofibrosis.

[0731] In embodiments, the cancer is a solid cancer. Exemplary solid cancers include, but are not limited to, ovarian cancer, rectal cancer, stomach cancer, testicular cancer, cancer of the anal region, uterine cancer, colon cancer, rectal cancer, renal-cell carcinoma, liver cancer, non-small cell carcinoma of the lung, cancer of the small intestine, cancer of the esophagus, melanoma, Kaposi's sarcoma, cancer of the endocrine system, cancer of the thyroid gland, cancer of the parathyroid gland, cancer of the adrenal gland, bone cancer, pancreatic cancer, skin cancer, cancer of the head or neck, cutaneous or intraocular malignant melanoma, uterine cancer, brain stem glioma, pituitary adenoma, epidermoid cancer, carcinoma of the cervix squamous cell cancer, carcinoma of the fallopian tubes, carcinoma of the endometrium, carcinoma of the vagina, sarcoma of soft tissue, cancer of the urethra, carcinoma of the vulva, cancer of the penis, cancer of the bladder, cancer of the kidney or ureter, carcinoma of the renal pelvis, spinal axis tumor, neoplasm of the central nervous system (CNS), primary CNS lymphoma, tumor angiogenesis, metastatic lesions of said cancers, or combinations thereof.

[0732] In embodiments, the multispecific or multifunctional molecules (or pharmaceutical composition) are administered in a manner appropriate to the disease to be treated or prevented. The quantity and frequency of administration will be determined by such factors as the condition of the patient, and the type and severity of the patient's disease. Appropriate dosages may be determined by clinical trials. For example, when “an effective amount” or “a therapeutic amount” is indicated, the precise amount of the pharmaceutical composition (or multispecific or multifunctional molecules) to be administered can be determined by a physician with consideration of individual differences in tumor size, extent of infection or metastasis, age, weight, and condition of the subject. In embodiments, the pharmaceutical composition described herein can be administered at a dosage of 10⁴ to 10⁹ cells/kg body weight, e.g., 10⁵ to 10⁶ cells/kg body weight, including all integer values within those ranges. In embodiments, the pharmaceutical composition described herein can be administered multiple times at these dosages. In embodiments, the pharmaceutical composition described herein can be administered using infusion techniques described in immunotherapy (see, e.g., Rosenberg et al., New Eng. J. of Med. 319:1676, 1988).

[0733] In embodiments, the multispecific or multifunctional molecules or pharmaceutical composition is administered to the subject parenterally. In embodiments, the cells are administered to the subject intravenously, subcutaneously, intratumorally, intranodally, intramuscularly, intradermally, or intraperitoneally. In embodiments, the cells are administered, e.g., injected, directly into a tumor or lymph node. In embodiments, the cells are administered as an infusion (e.g., as described in Rosenberg et al., New Eng. J. of Med. 319:1676, 1988) or an intravenous push. In embodiments, the cells are administered as an injectable depot formulation.

[0734] In embodiments, the subject is a mammal. In embodiments, the subject is a human, monkey, pig, dog, cat, cow, sheep, goat, rabbit, rat, or mouse. In embodiments, the subject is a human. In embodiments, the subject is a pediatric subject, e.g., less than 18 years of age, e.g., less than 17, 16, 15, 14, 13, 12, 11, 10, 9, 8, 7, 6, 5, 4, 3, 2, 1 or less years of age. In embodiments, the subject is an adult, e.g., at least 18 years of age, e.g., at least 19, 20, 21, 22, 23, 24, 25, 25-30, 30-35, 35-40, 40-50, 50-60, 60-70, 70-80, or 80-90 years of age.

### Combination Therapies

[0735] The multispecific or multifunctional molecules disclosed herein can be used in combination with a second therapeutic agent or procedure.

[0736] In embodiments, the multispecific or multifunctional molecule and the second therapeutic agent or procedure are administered/performed after a subject has been diagnosed with a cancer, e.g., before the cancer has been eliminated from the subject. In embodiments, the multispecific or multifunctional molecule and the second therapeutic agent or procedure are administered/performed simultaneously or concurrently. For example, the delivery of one treatment is still occurring when the delivery of the second commences, e.g., there is an overlap in administration of the treatments. In other embodiments, the multispecific or multifunctional molecule and the second therapeutic agent or procedure are administered/performed sequentially. For example, the delivery of one treatment ceases before the delivery of the other treatment begins.

[0737] In embodiments, combination therapy can lead to more effective treatment than monotherapy with either agent alone. In embodiments, the combination of the first and second treatment is more effective (e.g., leads to a greater reduction in symptoms and/or cancer cells) than the first or second treatment alone. In embodiments, the combination therapy permits use of a lower dose of the first or the second treatment compared to the dose of the first or second treatment normally required to achieve similar effects when administered as a monotherapy. In embodiments, the combination therapy has a partially additive effect, wholly additive effect, or greater than additive effect.

[0738] In one embodiment, the multispecific or multifunctional molecule is administered in combination with a therapy, e.g., a cancer therapy (e.g., one or more of anti-cancer agents, immunotherapy, photodynamic therapy (PDT), surgery and/or radiation). The terms “chemotherapeutic,” “chemotherapeutic agent,” and “anti-cancer agent” are used interchangeably herein. The administration of the multispecific or multifunctional molecule and the therapy, e.g., the cancer therapy, can be sequential (with or without overlap) or simultaneous. Administration of the multispecific or multifunctional molecule can be continuous or intermittent during the course of therapy (e.g., cancer therapy). Certain therapies described herein can be used to treat cancers and non-cancerous diseases. For example, PDT efficacy can be enhanced in cancerous and non-cancerous conditions (e.g., tuberculosis) using the methods and compositions described herein (reviewed in, e.g., Agostinis, P. et al. (2011) C A Cancer J. Clin. 61:250-281).

[0739] Anti-Cancer Therapies

[0740] In other embodiments, the multispecific or multifunctional molecule is administered in combination with a low or small molecular weight chemotherapeutic agent. Exemplary low or small molecular weight chemotherapeutic agents include, but not limited to, 13-cis-retinoic acid (isotretinoin, ACCUTANE®), 2-CdA (2-chlorodeoxyadenosine, cladribine, LEUSTATIN™), 5-azacitidine (azacitidine, VIDAZA®), 5-fluorouracil (5-FU, fluorouracil, ADRUCIL®), 6-mercaptopurine (6-MP, mercaptopurine, PURINETHOL®), 6-TG (6-thioguanine, thioguanine, THIOGUANINE TABLOID®), abraxane (paclitaxel protein-bound), actinomycin-D (dactinomycin, COSMEGEN®), alitretinoin (PANRETIN®), all-transretinoic acid (ATRA, tretinoin, VESANOID®), altretamine (hexamethylmelamine, HMM, HEXALEN®), amethopterin (methotrexate, methotrexate sodium, MTX, TREXALL™, RHEUMATREX®), amifostine (ETHYOL®), arabinosylcytosine (Ara-C, cytarabine, CYTOSAR-U®), arsenic trioxide (TRISENOX®), asparaginase (Erwinia L-asparaginase, L-asparaginase, ELSPAR®, KIDROLASE®), BCNU (carmustine, BiCNU®), bendamustine (TREANDA®), bexarotene (TARGRETIN®), bleomycin (BLENOXANE®), busulfan (BUSULFEX®, MYLERAN®), calcium leucovorin (Citrovorum Factor, folinic acid, leucovorin), camptothecin-11 (CPT-11, irinotecan, CAMPTOSAR®), capecitabine (XELODA®), carboplatin (PARAPLATIN®), carmustine wafer (prolifeprospan 20 with carmustine implant, GLIADEL® wafer), CCI-779 (temsirolimus, TORISEL®), CCNU (lomustine, CeeNU), CDDP (cisplatin, PLATINOL®, PLATINOL-AQ®), chlorambucil (leukeran), cyclophosphamide (CYTOXAN®, NEOSAR®), dacarbazine (DIC, DTIC, imidazole carboxamide, DTIC-DOME®), daunomycin (daunorubicin, daunorubicin hydrochloride, rubidomycin hydrochloride, CERUBIDINE®), decitabine (DACOGEN®), dexrazoxane (ZINECARD®), DHAD (mitoxantrone, NOVANTRONE®), docetaxel (TAXOTERE®), doxorubicin (ADRIAMYCIN®, RUBEX®), epirubicin (ELLENCE™), estramustine (EMCYT®), etoposide (VP-16, etoposide phosphate, TOPOSAR®, VEPESID®, ETOPOPHOS®), floxuridine (FUDR®), fludarabine (FLUDARA®), fluorouracil (cream) (CARAC™, EFUDEX®, FLUOROPLEX®), gemcitabine (GEMZAR®), hydroxyurea (HYDREA®, DROXIA™, MYLOCEL™) idarubicin (IDAMYCIN®), ifosfamide (IFEX®), ixabepilone (IXEMPRA™), LCR (leurocristine, vincristine, VCR, ONCOVIN®, VINCASAR PFS®), L-PAM (L-sarcolysin, melphalan, phenylalanine mustard, ALKERAN®), mechlorethamine (mechlorethamine hydrochloride, mustine, nitrogen mustard, MUSTARGEN®), mesna (MESNEX™), mitomycin (mitomycin-C, MTC, MUTAMYCIN®), nelarabine (ARRANON®), oxaliplatin (ELOXATIN™), paclitaxel (TAXOL®, ONXAL™), pegaspargase (PEG-L-asparaginase, ONCOSPAR®), PEMETREXED (ALIMTA®), pentostatin (NIPENT®), procarbazine (MATULANE®), streptozocin (ZANOSAR®), temozolomide (TEMODAR®), teniposide (VM-26, VUMON®), TESPA (thiophosphoamide, thiotepa, TSPA, THIOPLEX®), topotecan (HYCAMTIN®), vinblastine (vinblastine sulfate, vincaleukoblastine, VLB, ALKABAN-AQ®, VELBAN®), vinorelbine (vinorelbine tartrate, NAVELBINE®), and vorinostat (ZOLINZA®).

[0741] In another embodiment, the multispecific or multifunctional molecule is administered in conjunction with a biologic. Biologics useful in the treatment of cancers are known in the art and a binding molecule of the invention may be administered, for example, in conjunction with such known biologics. For example, the FDA has approved the following biologics for the treatment of breast cancer: HERCEPTIN® (trastuzumab, Genentech Inc., South San Francisco, Calif.; a humanized monoclonal antibody that has anti-tumor activity in HER2-positive breast cancer); FASLODEX® (fulvestrant, AstraZeneca Pharmaceuticals, LP, Wilmington, Del.; an estrogen-receptor antagonist used to treat breast cancer); ARIMIDEX® (anastrozole, AstraZeneca Pharmaceuticals, LP; a nonsteroidal aromatase inhibitor which blocks aromatase, an enzyme needed to make estrogen); Aromasin® (exemestane, Pfizer Inc., New York, N.Y.; an irreversible, steroidal aromatase inactivator used in the treatment of breast cancer); FEMARA® (letrozole, Novartis Pharmaceuticals, East Hanover, N.J.; a nonsteroidal aromatase inhibitor approved by the FDA to treat breast cancer); and NOLVADEX® (tamoxifen, AstraZeneca Pharmaceuticals, LP; a nonsteroidal antiestrogen approved by the FDA to treat breast cancer). Other biologics with which the binding molecules of the invention may be combined include: AVASTIN® (bevacizumab, Genentech Inc.; the first FDA-approved therapy designed to inhibit angiogenesis); and ZEVALIN® (ibritumomab tiuxetan, Biogen Idec, Cambridge, Mass.; a radiolabeled monoclonal antibody currently approved for the treatment of B-cell lymphomas).

[0742] In addition, the FDA has approved the following biologics for the treatment of colorectal cancer: AVASTIN®; ERBITUX® (cetuximab, ImClone Systems Inc., New York, N.Y., and Bristol-Myers Squibb, New York, N.Y.; is a monoclonal antibody directed against the epidermal growth factor receptor (EGFR)); GLEEVEC® (imatinib mesylate; a protein kinase inhibitor); and ERGAMISOL® (levamisole hydrochloride, Janssen Pharmaceutica Products, LP, Titusville, N.J.; an immunomodulator approved by the FDA in 1990 as an adjuvant treatment in combination with 5-fluorouracil after surgical resection in patients with Dukes' Stage C colon cancer).

[0743] For the treatment of lung cancer, exemplary biologics include TARCEVA® (erlotinib HCL, OSI Pharmaceuticals Inc., Melville, N.Y.; a small molecule designed to target the human epidermal growth factor receptor 1 (HER1) pathway).

[0744] For the treatment of multiple myeloma, exemplary biologics include VELCADE® Velcade (bortezomib, Millennium Pharmaceuticals, Cambridge Mass.; a proteasome inhibitor). Additional biologics include THALIDOMID® (thalidomide, Clegene Corporation, Warren, N.J.; an immunomodulatory agent and appears to have multiple actions, including the ability to inhibit the growth and survival of myeloma cells and anti-angiogenesis).

[0745] Additional exemplary cancer therapeutic antibodies include, but are not limited to, 3F8, abagovomab, adecatumumab, afutuzumab, alacizumab pegol, alemtuzumab (CAMPATH®, MABCAMPATH®), altumomab pentetate (HYBRI-CEAKER®), anatumomab mafenatox, anrukinzumab (IMA-638), apolizumab, arcitumomab (CEA-SCAN®), bavituximab, bectumomab (LYMPHOSCAN®), belimumab (BENLYSTA®, LYMPHOSTAT-B®), besilesomab (SCINTIMUN®), bevacizumab (AVASTIN®), bivatuzumab mertansine, blinatumomab, brentuximab vedotin, cantuzumab mertansine, capromab pendetide (PROSTASCINT®), catumaxomab (REMOVAB®), CC49, cetuximab (C225, ERBITUX®), citatuzumab bogatox, cixutumumab, clivatuzumab tetraxetan, conatumumab, dacetuzumab, denosumab (PROLIA®), detumomab, ecromeximab, edrecolomab (PANOREX®), elotuzumab, epitumomab cituxetan, epratuzumab, ertumaxomab (REXOMUN®), etaracizumab, farletuzumab, figitumumab, fresolimumab, galiximab, gemtuzumab ozogamicin (MYLOTARG®), girentuximab, glembatumumab vedotin, ibritumomab (ibritumomab tiuxetan, ZEVALIN®), igovomab (INDIMACIS-125®), intetumumab, inotuzumab ozogamicin, ipilimumab, iratumumab, labetuzumab (CEA-CIDE®), lexatumumab, lintuzumab, lucatumumab, lumiliximab, mapatumumab, matuzumab, milatuzumab, minretumomab, mitumomab, nacolomab tafenatox, naptumomab estafenatox, necitumumab, nimotuzumab (THERACIM®, THERALOC®), nofetumomab merpentan (VERLUMA®), ofatumumab (ARZERRA®), olaratumab, oportuzumab monatox, oregovomab (OVAREX®), panitumumab (VECTIBIX®), pemtumomab (THERAGYN®), pertuzumab (OMNITARG®), pintumomab, pritumumab, ramucirumab, ranibizumab (LUCENTIS®), rilotumumab, rituximab (MABTHERA®, RITUXAN®), robatumumab, satumomab pendetide, sibrotuzumab, siltuximab, sontuzumab, tacatuzumab tetraxetan (AFP-CIDE®), taplitumomab paptox, tenatumomab, TGN1412, ticilimumab (tremelimumab), tigatuzumab, TNX-650, tositumomab (BEXXAR®), trastuzumab (HERCEPTIN®), tremelimumab, tucotuzumab celmoleukin, veltuzumab, volociximab, votumumab (HUMASPECT®), zalutumumab (HUMAX-EGFR®), and zanolimumab (HUMAX-CD4®).

[0746] In other embodiments, the multispecific or multifunctional molecule is administered in combination with a viral cancer therapeutic agent. Exemplary viral cancer therapeutic agents include, but not limited to, vaccinia virus (vvDD-CDSR), carcinoembryonic antigen-expressing measles virus, recombinant vaccinia virus (TK-deletion plus GM-CSF), Seneca Valley virus-001, Newcastle virus, coxsackie virus A21, GL-ONC1, EBNA1 C-terminal/LMP2 chimeric protein-expressing recombinant modified vaccinia Ankara vaccine, carcinoembryonic antigen-expressing measles virus, G207 oncolytic virus, modified vaccinia virus Ankara vaccine expressing p53, OncoVEX GM-CSF modified herpes-simplex 1 virus, fowlpox virus vaccine vector, recombinant vaccinia prostate-specific antigen vaccine, human papillomavirus 16/18 L1 virus-like particle/AS04 vaccine, MVA-EBNA1/LMP2 Inj. vaccine, quadrivalent HPV vaccine, quadrivalent human papillomavirus (types 6, 11, 16, 18) recombinant vaccine (GARDASIL®), recombinant fowlpox-CEA(6D)/TRICOM vaccine; recombinant vaccinia-CEA(6D)-TRICOM vaccine, recombinant modified vaccinia Ankara-5T4 vaccine, recombinant fowlpox-TRICOM vaccine, oncolytic herpes virus NV1020, HPV L1 VLP vaccine V504, human papillomavirus bivalent (types 16 and 18) vaccine (CERVARIX®), herpes simplex virus HF10, Ad5CMV-p53 gene, recombinant vaccinia DF3/MUC1 vaccine, recombinant vaccinia-MUC-1 vaccine, recombinant vaccinia-TRICOM vaccine, ALVAC MART-1 vaccine, replication-defective herpes simplex virus type I (HSV-1) vector expressing human Preproenkephalin (NP2), wild-type reovirus, reovirus type 3 Dearing (REOLYSIN®), oncolytic virus HSV1716, recombinant modified vaccinia Ankara (MVA)-based vaccine encoding Epstein-Barr virus target antigens, recombinant fowlpox-prostate specific antigen vaccine, recombinant vaccinia prostate-specific antigen vaccine, recombinant vaccinia-B7.1 vaccine, rAd-p53 gene, Ad5-delta24RGD, HPV vaccine 580299, JX-594 (thymidine kinase-deleted vaccinia virus plus GM-CSF), HPV-16/18 L1/ASO4, fowlpox virus vaccine vector, vaccinia-tyrosinase vaccine, MEDI-517 HPV-16/18 VLP ASO4 vaccine, adenoviral vector containing the thymidine kinase of herpes simplex virus TK99UN, HspE7, FP253/Fludarabine, ALVAC(2) melanoma multi-antigen therapeutic vaccine, ALVAC-hB7.1, canarypox-hIL-12 melanoma vaccine, Ad-REIC/Dkk-3, rAd-IFN SCH 721015, TIL-Ad-INFg, Ad-ISF35, and coxsackievirus A21 (CVA21, CAVATAK®).

[0747] In other embodiments, the multispecific or multifunctional molecule is administered in combination with a nanopharmaceutical. Exemplary cancer nanopharmaceuticals include, but not limited to, ABRAXANE® (paclitaxel bound albumin nanoparticles), CRLX101 (CPT conjugated to a linear cyclodextrin-based polymer), CRLX288 (conjugating docetaxel to the biodegradable polymer poly (lactic-co-glycolic acid)), cytarabine liposomal (liposomal Ara-C, DEPOCYT™), daunorubicin liposomal (DAUNOXOME®), doxorubicin liposomal (DOXIL®, CAELYX®), encapsulated-daunorubicin citrate liposome (DAUNOXOME®), and PEG anti-VEGF aptamer (MACUGEN®).

[0748] In some embodiments, the multispecific or multifunctional molecule is administered in combination with paclitaxel or a paclitaxel formulation, e.g., TAXOL®, protein-bound paclitaxel (e.g., ABRAXANE®). Exemplary paclitaxel formulations include, but are not limited to, nanoparticle albumin-bound paclitaxel (ABRAXANE®, marketed by Abraxis Bioscience), docosahexaenoic acid bound-paclitaxel (DHA-paclitaxel, Taxoprexin, marketed by Protarga), polyglutamate bound-paclitaxel (PG-paclitaxel, paclitaxel poliglumex, CT-2103, XYOTAX, marketed by Cell Therapeutic), the tumor-activated prodrug (TAP), ANG105 (Angiopep-2 bound to three molecules of paclitaxel, marketed by ImmunoGen), paclitaxel-EC-1 (paclitaxel bound to the erbB2-recognizing peptide EC-1; see Li et al., Biopolymers (2007) 87:225-230), and glucose-conjugated paclitaxel (e.g., 2′-paclitaxel methyl 2-glucopyranosyl succinate, see Liu et al., Bioorganic & Medicinal Chemistry Letters (2007) 17:617-620).

[0749] Exemplary RNAi and antisense RNA agents for treating cancer include, but not limited to, CALAA-01, siG12D LODER (Local Drug EluteR), and ALN-VSP02.

[0750] Other cancer therapeutic agents include, but not limited to, cytokines (e.g., aldesleukin (IL-2, Interleukin-2, PROLEUKIN®), alpha Interferon (IFN-alpha, Interferon alfa, INTRON® A (Interferon alfa-2b), ROFERON-A® (Interferon alfa-2a)), Epoetin alfa (PROCRIT®), filgrastim (G-CSF, Granulocyte-Colony Stimulating Factor, NEUPOGEN®), GM-CSF (Granulocyte Macrophage Colony Stimulating Factor, sargramostim, LEUKINE™), IL-11 (Interleukin-11, oprelvekin, NEUMEGA®), Interferon alfa-2b (PEG conjugate) (PEG interferon, PEG-INTRON™), and pegfilgrastim (NEULASTA™)), hormone therapy agents (e.g., aminoglutethimide (CYTADREN®), anastrozole (ARIMIDEX®), bicalutamide (CASODEX®), exemestane (AROMASIN®), fluoxymesterone (HALOTESTIN®), flutamide (EULEXIN®), fulvestrant (FASLODEX®), goserelin (ZOLADEX®), letrozole (FEMARA®), leuprolide (ELIGARD™, LUPRON®, LUPRON DEPOT®, VIADUR™), megestrol (megestrol acetate, MEGACE®), nilutamide (ANANDRON®, NILANDRON®), octreotide (octreotide acetate, SANDOSTATIN®, SANDOSTATIN LAR®), raloxifene (EVISTA®), romiplostim (NPLATE®), tamoxifen (NOVALDEX®), and toremifene (FARESTON®)), phospholipase A2 inhibitors (e.g., anagrelide (AGRYLIN®)), biologic response modifiers (e.g., BCG (THERACYS®, TICE®), and Darbepoetin alfa (ARANESP®)), target therapy agents (e.g., bortezomib (VELCADE®), dasatinib (SPRYCEL™), denileukin diftitox (ONTAK®), erlotinib (TARCEVA®), everolimus (AFINITOR®), gefitinib (IRESSA®), imatinib mesylate (STI-571, GLEEVEC™), lapatinib (TYKERB®), sorafenib (NEXAVAR®), and SU11248 (sunitinib, SUTENT®)), immunomodulatory and antiangiogenic agents (e.g., CC-5013 (lenalidomide, REVLIMID®), and thalidomide (THALOMID®)), glucocorticosteroids (e.g., cortisone (hydrocortisone, hydrocortisone sodium phosphate, hydrocortisone sodium succinate, ALA-CORT®, HYDROCORT ACETATE®, hydrocortone phosphate LANACORT®, SOLU-CORTEF®), decadron (dexamethasone, dexamethasone acetate, dexamethasone sodium phosphate, DEXASONE®, DIODEX®, HEXADROL®, MAXIDEX®), methylprednisolone (6-methylprednisolone, methylprednisolone acetate, methylprednisolone sodium succinate, DURALONE®, MEDRALONE®, MEDROL®, M-PREDNISOL®, SOLU-MEDROL®), prednisolone (DELTA-CORTEF®, ORAPRED®, PEDIAPRED®, PRELONE®), and prednisone (DELTASONE®, LIQUID PRED®, METICORTEN®, ORASONE®)), and bisphosphonates (e.g., pamidronate (AREDIA®), and zoledronic acid (ZOMETA®))

[0751] In some embodiments, the multispecific or multifunctional molecule is used in combination with a tyrosine kinase inhibitor (e.g., a receptor tyrosine kinase (RTK) inhibitor). Exemplary tyrosine kinase inhibitor include, but are not limited to, an epidermal growth factor (EGF) pathway inhibitor (e.g., an epidermal growth factor receptor (EGFR) inhibitor), a vascular endothelial growth factor (VEGF) pathway inhibitor (e.g., an antibody against VEGF, a VEGF trap, a vascular endothelial growth factor receptor (VEGFR) inhibitor (e.g., a VEGFR-1 inhibitor, a VEGFR-2 inhibitor, a VEGFR-3 inhibitor)), a platelet derived growth factor (PDGF) pathway inhibitor (e.g., a platelet derived growth factor receptor (PDGFR) inhibitor (e.g., a PDGFR-B inhibitor)), a RAF-1 inhibitor, a KIT inhibitor and a RET inhibitor. In some embodiments, the anti-cancer agent used in combination with the AHCM agent is selected from the group consisting of: axitinib (AG013736), bosutinib (SKI-606), cediranib (RECENTIN™, AZD2171), dasatinib (SPRYCEL®, BMS-354825), erlotinib (TARCEVA®), gefitinib (IRESSA®), imatinib (Gleevec®, CGP57148B, STI-571), lapatinib (TYKERB®, TYVERB®), lestaurtinib (CEP-701), neratinib (HKI-272), nilotinib (TASIGNA®), semaxanib (semaxinib, SU5416), sunitinib (SUTENT®, SU11248), toceranib (PALLADIA®), vandetanib (ZACTIMA®, ZD6474), vatalanib (PTK787, PTK/ZK), trastuzumab (HERCEPTIN®), bevacizumab (AVASTIN®), rituximab (RITUXAN®), cetuximab (ERBITUX®), panitumumab (VECTIBIX®), ranibizumab (Lucentis®), nilotinib (TASIGNA®), sorafenib (NEXAVAR®), alemtuzumab (CAMPATH®), gemtuzumab ozogamicin (MYLOTARG®), ENMD-2076, PCI-32765, AC220, dovitinib lactate (TK1258, CHIR-258), BIBW 2992 (TOVOK™), SGX523, PF-04217903, PF-02341066, PF-299804, BMS-777607, ABT-869, MP470, BIBF 1120 (VARGATEF®), AP24534, JNJ-26483327, MGCD265, DCC-2036, BMS-690154, CEP-11981, tivozanib (AV-951), OSI-930, MM-121, XL-184, XL-647, XL228, AEE788, AG-490, AST-6, BMS-599626, CUDC-101, PD153035, pelitinib (EKB-569), vandetanib (zactima), WZ3146, WZ4002, WZ8040, ABT-869 (linifanib), AEE788, AP24534 (ponatinib), AV-951(tivozanib), axitinib, BAY 73-4506 (regorafenib), brivanib alaninate (BMS-582664), brivanib (BMS-540215), cediranib (AZD2171), CHIR-258 (dovitinib), CP 673451, CYC116, E7080, Ki8751, masitinib (AB1010), MGCD-265, motesanib diphosphate (AMG-706), MP-470, OSI-930, Pazopanib Hydrochloride, PD173074, Sorafenib Tosylate (Bay 43-9006), SU 5402, TSU-68(SU6668), vatalanib, XL880 (GSK1363089, EXEL-2880). Selected tyrosine kinase inhibitors are chosen from sunitinib, erlotinib, gefitinib, or sorafenib. In one embodiment, the tyrosine kinase inhibitor is sunitinib.

[0752] In one embodiment, the multispecific or multifunctional molecule is administered in combination with one of more of: an anti-angiogenic agent, or a vascular targeting agent or a vascular disrupting agent. Exemplary anti-angiogenic agents include, but are not limited to, VEGF inhibitors (e.g., anti-VEGF antibodies (e.g., bevacizumab); VEGF receptor inhibitors (e.g., itraconazole); inhibitors of cell proliferatin and/or migration of endothelial cells (e.g., carboxyamidotriazole, TNP-470); inhibitors of angiogenesis stimulators (e.g., suramin), among others. A vascular-targeting agent (VTA) or vascular disrupting agent (VDA) is designed to damage the vasculature (blood vessels) of cancer tumors causing central necrosis (reviewed in, e.g., Thorpe, P. E. (2004) Clin. Cancer Res. Vol. 10:415-427). VTAs can be small-molecule. Exemplary small-molecule VTAs include, but are not limited to, microtubule destabilizing drugs (e.g., combretastatin A-4 disodium phosphate (CA4P), ZD6126, AVE8062, Oxi 4503); and vadimezan (ASA404).

[0753] Immune Checkpoint Inhibitors

[0754] In other embodiments, methods described herein comprise use of an immune checkpoint inhibitor in combination with the multispecific or multifunctional molecule. The methods can be used in a therapeutic protocol in vivo.

[0755] In embodiments, an immune checkpoint inhibitor inhibits a checkpoint molecule. Exemplary checkpoint molecules include but are not limited to CTLA4, PD1, PD-L1, PD-L2, TIM3, LAG3, CD160, 2B4, CD80, CD86, B7-H3 (CD276), B7-H4 (VTCN1), HVEM (TNFRSF14 or CD270), BTLA, KIR, MHC class I, MHC class II, GAL9, VISTA, BTLA, TIGIT, LAIR1, and A2aR. See, e.g., Pardoll. Nat. Rev. Cancer 12.4(2012):252-64, incorporated herein by reference.

[0756] In embodiments, the immune checkpoint inhibitor is a PD-1 inhibitor, e.g., an anti-PD-1 antibody such as Nivolumab, Pembrolizumab or Pidilizumab. Nivolumab (also called MDX-1106, MDX-1106-04, ONO-4538, or BMS-936558) is a fully human IgG4 monoclonal antibody that specifically inhibits PD1. See, e.g., U.S. Pat. No. 8,008,449 and WO2006/121168. Pembrolizumab (also called Lambrolizumab, MK-3475, MK03475, SCH-900475 or KEYTRUDA®; Merck) is a humanized IgG4 monoclonal antibody that binds to PD-1. See, e.g., Hamid, O. et al. (2013) New England Journal of Medicine 369 (2): 134-44, U.S. Pat. No. 8,354,509 and WO2009/114335. Pidilizumab (also called CT-011 or Cure Tech) is a humanized IgG1k monoclonal antibody that binds to PD1. See, e.g., WO2009/101611. In one embodiment, the inhibitor of PD-1 is an antibody molecule having a sequence substantially identical or similar thereto, e.g., a sequence at least 85%, 90%, 95% identical or higher to the sequence of Nivolumab, Pembrolizumab or Pidilizumab. Additional anti-PD1 antibodies, e.g., AMP 514 (Amplimmune), are described, e.g., in U.S. Pat. No. 8,609,089, US 2010028330, and/or US 20120114649.

[0757] In some embodiments, the PD-1 inhibitor is an immunoadhesin, e.g., an immunoadhesin comprising an extracellular/PD-1 binding portion of a PD-1 ligand (e.g., PD-L1 or PD-L2) that is fused to a constant region (e.g., an Fc region of an immunoglobulin). In embodiments, the PD-1 inhibitor is AMP-224 (B7-DCIg, e.g., described in WO2011/066342 and WO2010/027827), a PD-L2 Fc fusion soluble receptor that blocks the interaction between B7-H1 and PD-1.

[0758] In embodiments, the immune checkpoint inhibitor is a PD-L1 inhibitor, e.g., an antibody molecule. In some embodiments, the PD-L1 inhibitor is YW243.55.S70, MPDL3280A, MEDI-4736, MSB-0010718C, or MDX-1105. In some embodiments, the anti-PD-L1 antibody is MSB0010718C (also called A09-246-2; Merck Serono), which is a monoclonal antibody that binds to PD-L1. Exemplary humanized anti-PD-L1 antibodies are described, e.g., in WO2013/079174. In one embodiment, the PD-L1 inhibitor is an anti-PD-L1 antibody, e.g., YW243.55.S70. The YW243.55.S70 antibody is described, e.g., in WO 2010/077634. In one embodiment, the PD-L1 inhibitor is MDX-1105 (also called BMS-936559), which is described, e.g., in WO2007/005874. In one embodiment, the PD-L1 inhibitor is MDPL3280A (Genentech/Roche), which is a human Fc-optimized IgG1 monoclonal antibody against PD-L1. See, e.g., U.S. Pat. No. 7,943,743 and U.S. Publication No.: 20120039906. In one embodiment, the inhibitor of PD-L1 is an antibody molecule having a sequence substantially identical or similar thereto, e.g., a sequence at least 85%, 90%, 95% identical or higher to the sequence of YW243.55.S70, MPDL3280A, MEDI-4736, MSB-0010718C, or MDX-1105.

[0759] In embodiments, the immune checkpoint inhibitor is a PD-L2 inhibitor, e.g., AMP-224 (which is a PD-L2 Fc fusion soluble receptor that blocks the interaction between PD1 and B7-H1. See, e.g., WO2010/027827 and WO2011/066342.

[0760] In one embodiment, the immune checkpoint inhibitor is a LAG-3 inhibitor, e.g., an anti LAG-3 antibody molecule. In embodiments, the anti-LAG-3 antibody is BMS-986016 (also called BMS986016; Bristol-Myers Squibb). BMS-986016 and other humanized anti-LAG-3 antibodies are described, e.g., in US 2011/0150892, WO2010/019570, and WO2014/008218.

[0761] In embodiments, the immune checkpoint inhibitor is a TIM-3 inhibitor, e.g., anti-TIM3 antibody molecule, e.g., described in U.S. Pat. No. 8,552,156, WO 2011/155607, EP 2581113 and U.S. Publication No.: 2014/044728.

[0762] In embodiments, the immune checkpoint inhibitor is a CTLA-4 inhibitor, e.g., anti-CTLA-4 antibody molecule. Exemplary anti-CTLA4 antibodies include Tremelimumab (IgG2 monoclonal antibody from Pfizer, formerly known as ticilimumab, CP-675,206); and Ipilimumab (also called MDX-010, CAS No. 477202-00-9). Other exemplary anti-CTLA-4 antibodies are described, e.g., in U.S. Pat. No. 5,811,097.

### CRS Grading

[0763] In some embodiments, the compositions described herein may induce lower levels of cytokine release syndrome (CRS) and/or may have a lower chance of causing (e.g., may not cause) CRS compared to other compositions. In some embodiments, CRS can be graded in severity from 1-5 as follows. Grades 1-3 are less than severe CRS. Grades 4-5 are severe CRS. For Grade 1 CRS, only symptomatic treatment is needed (e.g., nausea, fever, fatigue, myalgias, malaise, headache) and symptoms are not life threatening. For Grade 2 CRS, the symptoms require moderate intervention and generally respond to moderate intervention. Subjects having Grade 2 CRS develop hypotension that is responsive to either fluids or one low-dose vasopressor; or they develop grade 2 organ toxicity or mild respiratory symptoms that are responsive to low flow oxygen (<40% oxygen). In Grade 3 CRS subjects, hypotension generally cannot be reversed by fluid therapy or one low-dose vasopressor. These subjects generally require more than low flow oxygen and have grade 3 organ toxicity (e.g., renal or cardiac dysfunction or coagulopathy) and/or grade 4 transaminitis. Grade 3 CRS subjects require more aggressive intervention, e.g., oxygen of 40% or higher, high dose vasopressor(s), and/or multiple vasopressors. Grade 4 CRS subjects suffer from immediately life-threatening symptoms, including grade 4 organ toxicity or a need for mechanical ventilation. Grade 4 CRS subjects generally do not have transaminitis. In Grade 5 CRS subjects, the toxicity causes death. Sets of criteria for grading CRS are provided herein as Table 25, Table 26, and Table 27. Unless otherwise specified, CRS as used herein refers to CRS according to the criteria of Table 26.

[0764] In embodiments, CRS is graded according to Table 25:

TABLE 25
CRS grading

| | |
|---|---|
| Gr1 | Supportive care only |
| Gr2 | IV therapies +/− hospitalization. |
| Gr3 | Hypotension requiring IV fluids or low-dose vasoactives |
| | or hypoxemia requiring oxygen, CPAP, or BIPAP. |
| Gr4 | Hypotension requiring high-dose vasoactives |
| | or hypoxemia requiring mechanical ventilation. |
| Gr5 | Death |

TABLE 26
CTCAE v 4.0 CRS grading scale

| CRS grade | Characteristics |
|---|---|
| Grade 1 | Mild; No infusion interruption; No intervention |
| Grade 2 | Infusion interruption indicated but responds promptly to |
| | symptomatic treatment (e.g., antihistamines, NSAIDS, narcotics, |
| | IV fluids); prophylactic medications indicated for <=24 hrs |
| Grade 3 | Prolonged (e.g., not rapidly responsive to symptomatic medications and/or |
| | brief interruption of infusion); recurrence of symptoms following initial |
| | improvement; hospitalization indicated for clinical sequelae |
| | (e.g., renal impairment, pulmonary infiltrates) |
| Grade 4 | Life threatening consequences; pressor or ventilator support |

TABLE 27
NCI CRS grading scale

| CRS grade | Characteristics |
|---|---|
| Grade 1 | Symptoms are not life threatening and require symptomatic |
| | treatment only; e.g., fever, nausea, fatigue, headache, myalgias, malaise |
| Grade 2 | Symptoms require and respond to moderate intervention; |
| | Oxygen requirement <40% or hypotension responsive to fluids or |
| | low dose pressors or Grade 2 organ toxicity |
| Grade 3 | Symptoms require and respond to aggressive intervention; Oxygen |
| | requirement >=40% or Hypotension requiring high dose or |
| | multiple pressors or grade 3 organ |
| | toxicity or grade 4 transaminitis |
| Grade 4 | Life threatening symptoms Requirement for ventilator |
| | support or Grade 4; organ toxicity (excluding transaminitis) |

### EXAMPLES

### Example 1. Humanization of α-TRBV6-5 Antibody Clone Antibody A

[0765] The germline for the mouse α-TCRβ antibody clone Antibody A VH and VL were assigned using IMGT nomenclature, with CDR regions defined by a combined Kabat and Chothia classification. SEQ ID NO: 1 and SEQ ID NO: 2 are the Antibody A VH and VL sequences respectively where the VH germline is mouse IGHV1S12*01 and the VL germline is mouse IGKV6-15*01. SEQ ID NOs: 3-5 are the Antibody A VH CDR regions 1-3 respectively and SEQ ID NOs: 6-8 correspond to the VL CDR regions 1-3 (as described in TABLE 1A).

[0766] Humanization of the Antibody A VH and VL sequences was done separately using similar methodology. Amino acids positions were identified in the framework regions which were important for the success of CDR grafting. Human germline sequences were identified which preserved the necessary residues and contained a high amount of overall identity. When the human germline framework sequence did not contain a matching important amino acid, it was back mutated to match the mouse sequence. CDR regions were grafted onto the human germline unchanged. The Antibody A VH was humanized into human IGHV1-69*01 and the Antibody A VL was humanized into IGKV1-17*01 and IGKV1-27*01. All 3 humanized sequences were confirmed to contain no introduced potential negative post translational modification sites such as NG, DG, NS, NN, DS, NT, NXS, or NXT as a result of the humanization process. SEQ ID NO: 9 is the humanized Antibody A-H.1 VH and SEQ ID NOs: 10 and 11 are the humanized VL IGKV1-17*01 and IGKV1-27*01 germlines respectively (as described in TABLE 1A). FIGS. 1A and 1B show the murine and humanized sequences with annotations depicting the CDR and framework regions (FR).

### Example 2: Humanization of α-TRBV12-3 and TRBV12-4 Antibody Clone Antibody B

[0767] The germline for the mouse α-TCRβ antibody clone Antibody B VH and VL were assigned using IMGT nomenclature, with CDR regions defined by a combined Kabat and Chothia classification. SEQ ID NO: 15 and SEQ ID NO: 16 are the Antibody B VH and VL sequences respectively where the VH germline is mouse IGHV5-17*02 and the VL germline is mouse IGKV4-50*01. SEQ ID NOs: 152, 226, and 234 are the B-H VH CDR regions 1-3 respectively and SEQ ID NOs: 235-237 are the B-H VL CDR regions 1-3 (as described in Table 2A).

[0768] The method applied to humanize Antibody A described in Example 1 was used to humanize Antibody B. The Antibody B VH was humanized into human IGHV3-30*01, IGHV3-48*01, and IGHV3-66*01 and the Antibody B VL was humanized into human IGKV1-9*01, IGKV1-39*01, IGKV3-15*01, IGLV1-47*01 and IGLV3-10*01. SEQ ID NOs: 308, 3438, and 309 are the B-H.1A, B-H.1B, and B-H.1C humanized heavy chains and SEQ ID NOs: 238-242 are the B-H.D, B-H.1E, B-H.1F, B-H.1G and B-H.1H humanized light chains (as described in Table 2A). FIGS. 2A and 2B show the murine and humanized sequences with annotations depicting the CDR and framework regions (FR).

### Example 3: Characteristics of Anti-TCRβV Antibodies

[0769] Introduction

[0770] Current bispecific constructs designed to redirect T cells to promote tumor cell lysis for cancer immunotherapy typically utilize single chain variable fragments (scFvs) that are derived from monoclonal antibodies (mAb) directed against the CD3e subunit of the T cell receptor (TCR). However, there are limitations to this approach which may prevent the full realization of the therapeutic potential for such bispecific constructs. Previous studies have shown that, e.g., low “activating” doses of anti-CD3e mAb can cause long-term T cell dysfunction and exert immunosuppressive effects. In addition, anti-CD3e mAbs bind to all T cells and thus activate equally all T cells, which has been associated with the first dose side effects of anti-CD3e mAbs that result from massive T cell activation. These large number of activated T cells secrete substantial amounts of cytokines, the most important of which is Interferon gamma (IFNg). This excess amount of IFNg in turn, e.g., activates macrophages which then can overproduce proinflammatory cytokines such as IL-1, IL-6 and TNF-alpha, causing a “cytokine storm” known as the cytokine release syndrome (CRS). Thus, it might be advantageous to develop antibodies that are capable of binding and activating only a subset of necessary effector T cells to reduce the CRS.

[0771] Results

[0772] To that end, antibodies directed to the variable chain of the beta subunit of TCR (TCR Vb) were identified. These anti-TCR Vb antibodies bind and activate a subset of T cells, but with, e.g., no or markedly reduced CRS. Using plate-bound anti-TCR Vb13.1 mAbs (A-H.1 and A-H.2) it was shown that a population of T cells, defined by positive staining with A-H.1, can be expanded (from ˜5% of T cells on day 0 to almost 60% of total T cells on day 6 of cell culture) (FIGS. 4A-4C). For this experiment, human CD3+ T cells were isolated using magnetic-bead separation (negative selection) and activated with immobilized (plate-coated) A-H.1 or OKT3 (anti-CD3e) antibodies at 100 nM for 6 days. The expanded Vb13.1+ T cells display cytolytic activity against transformed cell line RPMI-8226 when co-cultured with purified CD3+ T cells (FIGS. 5A-5B).

[0773] Next, the ability of PBMCs activated by anti-TCR VB antibodies to produce cytokines was assessed. The cytokine production of PBMCs activated with anti-TCR VB antibodies was compared to the cytokine production of PBMCs activated with: (i) anti-CD3e antibodies (OKT3 or SP34-2); (ii) anti-TCR V alpha (TCR VA) antibodies including anti-TCR VA 12.1 antibody 6D6.6, anti-TCR VA24JA18 antibody 6B11; (iii) anti-TCR alpha beta antibody T10B9; and/or (iv) isotype control (BGM0109). The anti-TCR VB antibodies tested include: humanized anti-TCRVB 13.1 antibodies (A-H.1, or A-H.2), murine anti-TCR VB5 antibody E, murine anti-TCR VB8.1 antibody B, and murine anti-TCR VB12 antibody D. BGM0109 comprises the amino acid sequence of

(SEQ ID NO: 3282)
METDTLLLWVLLLWVPGSTGGLNDIFEAQKIEWHEGGGGSEPRTDTDTCP
NPPDPCPTCPTPDLLGGPSVFIFPPKPKDVLMISLTPKITCVVVDVSEEE
PDVQFNWYVNNVEDKTAQTETRQRQYNSTYRVVSVLPIKHQDWMSGKVFK
CKVNNNALPSPIEKTISKPRGQVRVPQIYTFPPPIEQTVKKDVSVTCLVT
GFLPQDIHVEWESNGQPQPEQNYKNTQPVLDSDGSYFLYSKLNVPKSRWD
QGDSFTCSVIHEALHNHHMTKTISRSLGNGGGGS.

[0774] As shown in FIG. 6A, when plate-bound A-H.1 or A-H.2, or anti-CD3e antibodies (OKT3 or SP34-2) were used to activate human PBMCs, the T cell cytokine IFNg was induced (FIG. 6A). All anti-TCR VB antibodies tested had a similar effect on the production of IFNg (FIG. 6B). The anti-TCR VA antibodies did not induce similar IFNg production.

[0775] With respect to IL-2 production, PBMCs activated with A-H.1 and A-H.2 resulted in increased IL-2 production (FIG. 7A) with delayed kinetics (FIG. 7B) as compared to PBMCs activated with anti-CD3e antibodies (OKT3 or SP34-2). FIG. 7B shows that anti-TCR VB antibody activated PBMCs demonstrate peak production of IL-2 at Day 5 or Day 6 post-activation (incubation with plate-coated antibodies). In contrast, IL-2 production in PBMCs activated with OKT3 peaked at day 2 post-activation. As with IFNG, the IL-2 effect (e.g., enhanced production of IL-2 and delayed kinetics) was similar across all anti-TCR VB antibodies tested (FIG. 7B).

[0776] The production of cytokines IL-6, IL-1β and TNF-alpha which are associated with “cytokine storms” (and accordingly CRS) was also assessed under similar conditions. FIGS. 8A, 9A and 10A shows that while PBMCs activated with anti-CD3e antibodies demonstrate production of IL-6 (FIG. 8A), TNF-alpha (FIG. 9A) and IL-1β (FIG. 10A), no or little induction of these cytokines was observed with PBMCs activated with A-H.1 or A-H.2. As shown in FIGS. 9B and 10B, TNF-alpha and IL-1β production was not induced by activation of PBMCs with any of the anti-TCR VB antibodies.

[0777] It was further noted that the kinetics of IFNg production by A-H.1-activated CD3+ T cells was delayed relative to those produced by CD3+ T cells activated by anti-CD3e mAbs (OKT3 and SP34-2) (FIGS. 11A and 11B).

[0778] Finally, it was observed that the subset of memory effector T cells known as T_{EMRA} was preferentially expanded in CD8+ T cells activated by A-H.1 or A-H.2 (FIG. 12). Isolated human PBMCs were activated with immobilized (plate-coated) anti-CD3e or anti-TCR Vβ13.1 at 100 nM for 6-days. After a 6-day incubation, T-cell subsets were identified by FACS staining for surface markers for Naive T cell (CD8+, CD95−, CD45RA+, CCR7+), T stem cell memory (TSCM; CD8+, CD95+, CD45RA+, CCR7+), T central memory (Tcm; CD8+, CD95+, CD45RA−, CCR7+), T effector memory (Tem; CD8+, CD95+, CD45RA−, CCR7−), and T effector memory re-expressing CD45RA (Temra; CD8+, CD95+, CD45RA+, CCR7−). Human PBMCs activated by anti-TCR Vβ13.1 antibodies (A-H.1 or A-H.2) increased CD8+ TSCM and Temra T cell subsets when compared to PBMCs activated by anti-CD3e antibodies (OKT3 or SP34-2). Similar expansion was observed with CD4+ T cells.

[0779] Conclusion

[0780] The data provided in this Example show that antibodies directed against TCR Vb can, e.g., preferentially activate a subset of T cells, leading to an expansion of T_{EMRA}, which can, e.g., promote tumor cell lysis but not CRS. Thus, bispecific constructs utilizing either a Fab or scFV or a peptide directed to the TCR Vb can, e.g., be used to activate and redirect T cells to promote tumor cell lysis for cancer immunotherapy, without, e.g., the harmful side-effects of CRS associated with anti-CD3e targeting.

### Example 4. Antibodies that Bind to TCRvβ

[0781] In this example, a number of affinity-matured anti-TCRvβ 6-5 antibodies were examined for binding to human and cynomolgus using Biacore.

[0782] Methods

[0783] For human TCRvβ binding, each antibody at 2 μg/mL was immobilized on a CM5 Series S Sensor Chip via anti-human Fc antibody to 50 RU. BIM0444 was diluted to 500 nM and then serially diluted two-fold. Association was 180 seconds and dissociation was 300 seconds. This assay was run in 1×HBS-EP+ Buffer pH 7.4 at 25° C. The data was fit using a 1:1 binding model.

[0784] For cynomolgus TCRvβ binding, each antibody at 2 μg/mL was immobilized on a CM5 Series S Sensor Chip via Protein L chip to 50 RU. BJM0847 was diluted to 1000 nM and then serially diluted two-fold. Association was 180 seconds and dissociation was 300 seconds. This assay was run in 1×HBS-EP+ Buffer pH 7.4 at 25° C. The data was fit using a 1:1 binding model.

[0785] For A-H.68 and A-H.13 cyno TCRvβ binding, each antibody at 10 Pg/mL was directly immobilized onto the CM5 sensor chip surface via amine coupling to a response of 500 RU. BJM0847 was diluted to 500 nM and then serially diluted two-fold. Association was 180 seconds and dissociation was 300 seconds. This assay was run in 1×HBS-EP+ Buffer pH 7.4 at 25° C. The data was fit using a 1:1 binding model.

[0786] Results

[0787] The anti-TCRvβ antibodies and their affinity for human and cynomolgus TCRvβ as measured using Biacore are shown in Table 20. The affinity to cynomolgus TCRvβ has been improved in BJM0498 and BJM0501 about six-fold, when compared to the parental antibody.

TABLE 20
Summary of anti-TCRβvP antibodies and their
affinity for human and cynomolgus TCRβvP

| | | Affinity | | Affinity | |
|---|---|---|---|---|---|
| Construct | Description | (human TCRβvP) | | (cyno TCRβvP) | |
| BHM1709 | Parental (bivalent Fab) | 13 | nM | 642 | nM |
| BJM0093 | Parental (2 × 2 CD 19) | 15 | nM | 431 | nM |
| BJM0498 | Bivalent scFv | 7.9 | nM | 86 | nM |
| BJM0501 | Bivalent scFv | 4.1 | nM | 87 | nM |
| BJM0502 | Bivalent scFv | 20 | nM | 387 | nM |
| A-H.23 | BJM0501 scFv-Fc IgG1 | 1.7 | nM | — | |
| A-H.68 | BJM0501 G94V scFv-Fc IgG1 | 829 | pM | 59 | nM* |
| A-H.13 | BJM0498 scFv | 3.8 | nM | 173 | nM* |
| A-H.67 | BJM0498 G94V scFv | 20 | nM | — | |
| BJM0897 | BJM0498 bivalent fab | 7.2 | nM | 69 | nM |
| BJM0898 | BJM0498 G94V bivalent fab | 11 | nM | 241 | nM |
| BJM0899 | BJM0501 bivalent fab | 3.7 | nM | 130 | nM |
| BJM0900 | BJM0501 G94V bivalent fab | 2.7 | nM | 50 | nM |
| BJM0912 | BJM0502 bivalent fab | 28 | nM | 326 | nM |
| A-H.24 | BJM0502 scFv | 12 | nM | — | |
| A-H.57 | single arm scFv | 469 | pM | 762 | pM |
| A-H.58 | single arm scFv | 491 | pM | 158 | pM |
| A-H.59 | single arm scFv | 323 | pM | 5.0 | nM |
| A-H.60 | single arm scFv | 445 | pM | 1.6 | nM |
| A-H.61 | single arm scFv | 349 | pM | 607 | pM |
| A-H.62 | single arm scFv | 447 | pM | 766 | pM |
| A-H.63 | single arm scFv | 274 | pM | 5.8 | nM |
| A-H.64 | single arm scFv | 486 | pM | 1.0 | nM |
| A-H.65 | single arm scFv | 396 | pM | 725 | pM |
| A-H.66 | single arm scFv | 338 | pM | 2.2 | nM |

*denotes construct immobilized directly onto CM5 chip surface via amine coupling

### Example 5. In Vitro Analysis of Antibodies that Bind to CD33 and TCRvβ

[0788] In this example, antibodies that bind to CD33 and TCRvβ were analyzed in in vitro assays.

[0789] Methods

[0790] Binding to TCRvβ+ Jurkat cells: TCRvβ 6-5 expressing Jurkat cells were cultured and expanded for binding assays. Cells were stained with viability dye for live cells and then tested for binding with anti-CD33×TCRvβ constructs in a dose response assay. Constructs bound to Jurkat cells were detected with anti-human Fc-AF647 via flow cytometry.

[0791] Anti-CD33×TCRvβ killing assay: To generate/expand primary TCRvβ 6-5+ T cells, purified healthy donor CD3+ T cells were activated with plate-bound anti-TCRvβ 6-5 antibody for 4-6 days (depending on donor) and then incubated with recombinant human IL-2 for 48 hours to allow further T-cell expansion. Expansion of TCRvβ 6-5+ cells was confirmed phenotypically by flow cytometry analysis with about ˜90% TCRvβ 6-5+ T-cells. Expanded TCRvβ 6-5+ T cells were co-cultured with CD33+ target cells (KILR assay platform; Eurofins) at E:T of 5:1 for 24 hours in the presence of the indicated anti-CD33×TCRvβ 6-5 constructs or anti-CD33×CD3 constructs. Cytotoxicity was measured using the KilR assay according to the manufacturer's protocol. Briefly, when KILR target cells are killed, the reporter protein is released into the media. Adding the detection reagents leads to the recognition of the reporter protein and generation of the chemiluminescent signal that is proportional to the number of dead cells.

[0792] Results

[0793] The bispecific antibodies that bind to CD33 and TCRvβ and their affinity for human and cynomolgus TCRvβ as measured using Biacore are shown in Table 21.

TABLE 21
Summary of bispecific antibodies that bind to CD33 and
TCRβv and their affinity for human and cynomolgus TCRβvp

| | | Affinity (human | | Affinity (cyno | |
|---|---|---|---|---|---|
| Construct | Description | TCRvβ) | | TCRvβ) | |
| BJM0498 | Bivalent scFv | 7.9 | nM | 86 | nM |
| BJM0901 | BJM0498/CD33 bispecific 2 × 2 | 7.09 | nM | 55 | nM |
| BJM0902 | BJM0498/CD33 bispecific 1 × 2 | 6.06 | nM | 58 | nM |
| BJM0906 | CD33/BJM0498 bispecific 1 × 2 | 6.6 | nM | 68 | nM |
| BJM0909 | CD33/BJM0498 bispecific 1 × 1 | 5.36 | nM | 84 | nM |
| BJM0923 | CD33/BJM0498 G94V | 19 | nM | 283 | nM |

bispecific 1 × 1

[0794] The anti-CD33×TCRvβ antibodies BJM0387, BJM0902, BJM0906, BJM0909, and BJM0923 showed binding to TCRvβ-expressing Jurkat cells (FIG. 13A) as well as CD33-expressing MOLM-13 cells (FIG. 13B). The anti-TCRvβ antibody BHM1709 (FIG. 13A) and the anti-CD33 antibody BJM0390 (FIG. 13B) were used as controls.

[0795] FIG. 14 shows EC50s of the anti-CD33×TCRvβ antibodies BJM0387, BJM0902, BJM0906, BJM0909, and BJM0923, and BJM0813 as well as EC50s of the anti-CD33×CD3 antibodies BJM0886, BJM0751, and BJM0815 to cells expressing CD3, TCRvβ, or CD33.

[0796] FIG. 15A shows staining of TCRvβ6-5 expanded T cells indicating greater than 85% purity. Background killing was low in the absence of treatment (FIGS. 15B and 15C). The anti-CD33×TCRvβ antibody BJM0387 effectively killed CD33-positive MV411 cells (FIG. 15B) and CD33-positive HL60 cells (FIG. 15C). BJM0387 achieved a similar level or higher level of killing than the anti-CD33×CD3 antibody BJM0395 (FIGS. 15B and 15C). The anti-RSV×TCRvβ antibody BJM0784, a negative control in this study, showed non-specific killing at higher concentrations (FIGS. 15B and 15C).

### Example 6. In Vivo Analysis of Antibodies that Bind to CD33 and TCRvβ

[0797] In this example, in vivo assays were conducted to examine antibodies that bind to CD33 and TCRvβ (also referred to as “CD33×TCRvβ” or “CD33×TCRvB”) as well as anti-CD33×TCRvβ antibodies that were further fused to IL2 (also referred to as “CD33×TCRvβ×IL2” or “CD33×TCRvB×IL2”).

[0798] Methods

[0799] TCRvβ+ T cell expansion: Human donor PBMCs (Cellular Technology Limited) were expanded with anti-TCRvβ antibody coated plates and checked by flow cytometry for the quality of expansion. The expanded cells were maintained in IL2 (50 units/ml from Roche) containing media for 1 week prior to being injected into the mice.

[0800] Flow cytometry: The expanded vβ cells were checked for percentages using a CytoFLEX LX Flow Cytometer (Beckman Coulter) and analyzed using Flow Jo software (Flowjo LLC, Ashlard, Orgeon).

[0801] Statistics: 2 way-ANOVA based statistical analysis was undertaken in GraphPad Prism Version 8 for Windows (GraphPad Software, La Jolla Calif. USA).

[0802] Animal studies: All animal work was performed at Elstar Vivarium (Cambridge, Mass.) and compliant with IACUC approved protocols. Six- to eight-week-old female NSG mice were obtained from JAX Laboratories. In all the Molm-13 Luc model studies, serial non-invasive assessment of disseminated Molm-13 Luc tumor burden was performed, using D-Luciferin (Melford Laboratories), which was injected intraperitoneally (IP) at a dose of 150 μg/mouse, and imaged using the IVIS Lumina S5 Imaging System (Perkin Elmer). Living Image software was used to quantify bioluminescence imaging (BLI) signals.

[0803] For the evaluation of molecules CD33×TCRvβ and CD33×TCRvβ×IL2, NSG mice received 0.75×10\hat{ }6 Molm-13Luc cells by intravenous injection on day 0. The mice were then injected intravenously on days 1, 5 and 8, with 10×10\hat{ }6 human donor PBMCs as effector cells that were previously tested for their ability to expand TCRvβ cells. Once disseminated tumor burden was established by BLI on day 4, mice were randomized and grouped into three arms (n=5 mice/arm) followed by administration with either PBS or CD33×TCRvβ (0.5 mg/kg) or CD33×TCRvβ×IL2 (0.22 mg/kg) on days 4, 7 and 10.

[0804] In a separate study, for the evaluation of molecule CD33×TCRvβ, NSG mice received 0.75×10\hat{ }6 Molm-13Luc cells by intravenous injection on day 0. The mice were then injected intravenously on days 1, 5 and 8 with 10×10\hat{ }6 pre expanded vβ cells as effectors. Once disseminated tumor burden was established by BLI on day 4, mice were randomized and grouped into three arms (n=5 mice/arm) followed by administration with either PBS or CD33×TCRvβ at 0.5 mg/kg or 2 mg/kg doses on days 4, 7 and 10.

[0805] Results

[0806] Humanized models of AML have been utilized to provide the proof of concept with the lead molecules falling under the two major concepts. CD33×TCRvβ was tested both in hPBMC and pre expanded TCRvβ cell engrafted Molm-13-Luc model. CD33×TCRvβ×IL2 was assessed in human PBMC engrafted Molm-13-Luc model.

[0807] Serial BLI assessments of the human PBMC engrafted Molm13-Luc tumor bearing mice revealed a significant reduction in tumor burden with both CD33×TCRvβ and CD33×TCRvβ×IL2 molecules as compared to PBS arms (FIGS. 16A and 16B). Consistently, a significant reduction (>90%) in tumor burden with CD33×TCRvβ molecule was also noted in pre expanded TCRvβ engrafted Molm13-Luc model (FIGS. 17A and 17B). In addition, no toxicity was observed in terms of behavior, physical appearance or distress in either of the agent treated animals.

[0808] In conclusion, described herein are the development and characterization of novel bispecific antibodies of relevance to malignant conditions where CD33 is expressed. Without wishing to be bound by theory, these bispecific antibodies elicit tumor cytotoxicity following binding, e.g., simultaneously binding, to both TCRvβ positive T cells and CD33 positive tumor cells. These mechanisms circumvent the potential for undesired T-cell activation and make these molecules exquisitely selective for CD33, a target that is expressed at high levels in a subset of heme malignancies or solid tumors with high levels of myeloid derived suppressor cells.

[0809] To our knowledge, this is the first direct evidence of efficacy with a bispecific molecule that targets CD33 and a subpopulation of TCRvβ positive T cells. Unlike molecules involving a CD3 engager (e.g., molecules that bind to CD33 and CD3), the molecules described here (CD33×TCRvβ and CD33×TCRvβ×IL2) are expected to show limited side effects. This new approach is appealing in that it targets leukemic cells and causes durable responses with minimal side effects.

### Example 7. Characterization of Antibodies that Bind to CD33 and NKp30

[0810] This example describes the characterization of antibodies that bind to CD33 and NKp30 (also referred to as “CD33×NKp30”) as well as anti-CD33×NKp30 antibodies that are further fused to IL2 (also referred to as “CD33×NKp30×IL2”). The molecules examined here are summarized in Table 22.

TABLE 22
Summary of antibodies that bind to CD33 and NKp30

| Molecule designation | Description |
|---|---|
| BJM1017 | CD33/NKp30 bispecific N297A |
| BJM1018 | CD33/NKp30 bispecific N297A |
| BJM1019 | CD33/NKp30/IL2 trispecific N297A |
| BJM1020 | CD33/NKp30/IL2 trispecific N297A |
| BJM0390 | CD33 bivalent N297A |
| BJM0859 | NKp30 monovalent N297A |
| BJM0860 | NKp30 monovalent N297A |

[0811] Methods

[0812] NK-cell-mediated killing assay: Primary natural killer (NK) cells were co-cultured with CFSE-labeled target cell lines (HL-60 and MOLM13) at a 5:1 (effector to target ratio) for 4 hours. Cell death of target cells was measured by staining with fixable viability dye and flow cytometric analysis. Specific lysis was calculated as (experimental−spontaneous) lysis/(complete−spontaneous) lysis×100. NK cell activation in the same assay was measured by measuring upregulation of LAMP1 (CD107) and CD69 on CD56+CFSE− cells.

[0813] Results

[0814] Bispecific antibodies that bind to CD33 and NKp30 (BJM1017 and BJM1018) induced NK-cell-mediated killing of HL60 target cells (FIG. 18A). NK cell activation was evidenced by upregulation of CD107 and CD69 on NK cells (FIG. 18B). Different effector to target ratios were tested (FIGS. 19A and 19B). At an effector-to-target ratio of 20:1, almost 100% of HL60 myeloid cells were lysed (FIG. 19A).

[0815] Primary NK cells from two different donors were incubated with HL-60 target cells at an effector-to-target ratio of 5:1 for 4 hours in the presence of the indicated antibodies. Lysis of HL-60 target cells was measured as described above. As shown in FIGS. 20A-20C, all the molecules tested induced lysis of HL-60 cells by primary NK cells.

[0816] A different target cell line MOLM-13 was also tested. Similarly, CD33×NKp30 molecules and CD33×NKp30×IL2 molecules induced primary NK-cell-mediated lysis of MOLM-13 target cells (FIG. 21).

[0817] The HL-60 cell killing assay was repeated with NK92 cells. CD33×NKp30 molecules and CD33×NKp30×IL2 molecules similarly induced lysis of HL-60 cells by NK92 cells (FIG. 22).

[0818] In summary, CD33×NKp30 bispecific molecules and CD33×NKp30×IL2 trispecific molecules induced lysis of HL-60 and MOLM-13 cells by primary NK cells. Anti-NKp30 single arm antibodies BJM0859 and BJM0860 induced some level of lysis of HL-60 cells at the highest concentration tested.

### Example 8: Biacore Analysis of Exemplary Anti-NKp30 Antibody Molecules

[0819] In this example, a series of exemplary anti-NKp30 antibody molecules were analyzed for their binding affinity for NKp30. Briefly, surface plasmon resonance (SPR) measurements were performed by using the BIAcore T200. Human NKp30 (BKM0179) was immobilized on a CM5 chip via anti-mouse Fc antibody to a response of 50 RU. Each exemplary antibody construct were injected at concentrations of 3.9, 7.8, 15.6, 31.2, 62.5, and 125 nM, and at a flow rate of 20 μl/min, over the surface on which the human NKp30 was immobilized. The data was fit using a 1:1 binding model.

[0820] As shown in Table 23, most of the exemplary antibodies showed preserved affinity to human NKp30 compared to the parental antibody.

TABLE 23
Biacore results

| | | Human Nkp30 | |
|---|---|---|---|
| Construct | Description | (BKM0179) | |
| BJM1078 | BJM0407 Parental | 1.48 | nM |
| BJM1079 | BJM0411 Parental | 1.26 | nM |
| BKM0138 | BJM0411 VL-N95A | 3.2 | nM |
| BKM0139 | BJMO411 VL-D92A | 3.2 | nM |
| BKM0140 | BJM0407 VL-D92A | 3.3 | nM |
| BKM0141 | BJM0407 VL-N95A | 3.0 | nM |
| BKM0142 | BJMO411 VH-N60A | 1.28 | nM |
| BKM0143 | BJM0407 VH-N60A | 1.45 | nM |
| BKM0144 | BJM0411 VH-N60A-VL-D92A-N95A | 6.4 | nM |
| BKM0145 | BJM0407 VH-N60A-VL-D92A-N95A | 4.2 | nM |

### Example 9. Optimization of α-TRBV6-5 Antibody

[0821] The anti TRBV6-5 antibody was optimized to improve affinity for the human and cyno antigen, improve thermal stability, and remove sequence motifs that might pose chemical stability liabilities. ScFv libraries were built using random mutagenesis (Caldwell et al. (1992) Randomization of genes by PCR mutagenesis. PCR Meth. Appl. 2:28) or a modified version of Kunkel mutagenesis (Kunkel T A. (1985) Rapid and efficient site-specific mutagenesis without phenotypic selection. PNAS 82(2): 488-92). For affinity improvement, library selections vs human and cyno antigens were performed using standard phage display (Lee, C M et al. (2007) Selection of human antibody fragments by phage display. Nature protocols 2, 3001) and yeast display techniques (Chao G, et al. (2006) Isolating and engineering human antibodies using yeast surface display. Nature Protocols. 1(2):755-69). Thermal challenge of phage or yeast populations was used to select for clones with improved thermal stability. Selections were followed by standard screening methods such as ELISA and flow cytometry to identify individual clones with improved properties. Following hit sequencing and analysis of mutation-activity correlation, second-generation libraries were constructed using the same methods above. Library selections and individual clone screening were repeated as above with the modification that more stringent conditions were applied to select for clones with maximized activity. Following hit sequencing, scFv genes were reformatted into the biologically relevant antibody format for expression, purification, and triaging.

### Exemplary Embodiments

[0822] The disclosure relates, inter alia, to novel multispecific or multifunctional molecules that include (i) an antigen binding domain that binds to CD33; and one or both of: (ii) an immune cell engager (e.g., chosen from a T cell engager, an NK cell engager, a B cell engager, a dendritic cell engager, or a macrophage cell engager) and/or (iii) a cytokine molecule. The terms “multispecific” or “multifunctional” are used interchangeably herein.

[0823] Without wishing to be bound by theory, the multispecific or multifunctional molecules disclosed herein are expected to target (e.g., localize, bridge and/or activate) an immune cell (e.g., an immune effector cell chosen form a T cell, an NK cell, a B cell, a dendritic cell or a macrophage), at a target cell, e.g., a cancer cell, expressing CD33. Increasing the proximity and/or activity of the immune cell using the multispecific molecules described herein is expected to enhance an immune response against the target cell (e.g., the cancer cell), thereby providing a more effective therapy (e.g., a more effective cancer therapy). Without being bound by theory, a targeted, localized immune response against the target cell (e.g., the cancer cell) is believed to reduce the effects of systemic toxicity of the multispecific molecules described herein.

[0824] In some embodiments, the multispecific or multifunctional molecules disclosed herein comprise an antigen binding domain that binds to CD33 and an antigen binding domain that binds to TCRvβ. Without wishing to be bound by theory, such molecules are capable of binding, activating, and/or expanding only a subset of T cells, avoiding or reducing cytokine release syndrome (CRS) and/or neurotoxicity (NT).

[0825] Accordingly, provided herein are, inter alia, multispecific molecules (e.g., multispecific or multifunctional antibody molecules) that include the aforesaid moieties, nucleic acids encoding the same, methods of producing the aforesaid molecules, and methods of treating a cancer using the aforesaid molecules.

[0826] Accordingly, in one aspect, the disclosure features a multifunctional molecule that includes:

(i) a first antigen binding domain that binds to CD33, and
(ii) one or both of:
(a) an immune cell engager chosen from a T cell engager (e.g., a second antigen binding domain that binds to TCRβV, e.g., as described herein), an NK cell engager (e.g., a second antigen binding domain that binds to NKp30, e.g., as described herein), a B cell engager, a dendritic cell engager, or a macrophage cell engager; or
(b) a cytokine molecule (e.g., an IL-2 molecule, e.g., as described herein).

[0827] In some embodiments, the multifunctional molecule comprises an antigen binding domain that binds to CD33 and an immune cell engager. In some embodiments, the multifunctional molecule comprises an antigen binding domain that binds to CD33, an immune cell engager, and a cytokine molecule.

[0828] In some embodiments, the antigen binding domain that binds to CD33 comprises one, two, or three heavy chain complementarity determining regions (HC CDRs) and/or one, two, or three light chain complementarity determining regions (LC CDRs) of an anti-CD33 antigen binding domain disclosed in Tables 5 and 6. In some embodiments, the antigen binding domain that binds to CD33 comprises one, two, or three HC CDRs and/or one, two, or three LC CDRs of an anti-CD33 antigen binding domain disclosed in SEQ ID NOs: 267-283. In some embodiments, the antigen binding domain that binds to CD33 comprises a heavy chain variable region (VH) and/or a light chain variable region (VL) of an anti-CD33 antigen binding domain disclosed in Tables 5 and 6, or a sequence with at least 80%, 85%, 90%, 92%, 95%, 97%, 98%, or 99% identity thereto. In some embodiments, the antigen binding domain that binds to CD33 comprises a VH and/or a VL of an anti-CD33 antigen binding domain disclosed in SEQ ID NOs: 267-283, or a sequence with at least 80%, 85%, 90%, 92%, 95%, 97%, 98%, or 99% identity thereto. In some embodiments, the antigen binding domain that binds to CD33 comprises an anti-CD33 antigen binding domain disclosed in Tables 5 and 6, or a sequence with at least 80%, 85%, 90%, 92%, 95%, 97%, 98%, or 99% identity thereto. In some embodiments, the antigen binding domain that binds to CD33 comprises an anti-CD33 antigen binding domain disclosed in SEQ ID NOs: 267-283, or a sequence with at least 80%, 85%, 90%, 92%, 95%, 97%, 98%, or 99% identity thereto.

[0829] In some embodiments, the multifunctional molecule comprises an immune cell engager chosen from a T cell engager, an NK cell engager, a B cell engager, a dendritic cell engager, or a macrophage cell engager. In some embodiments, the immune cell engager binds to and activates an immune cell, e.g., an effector cell. In some embodiments, the immune cell engager binds to, but does not activate, an immune cell, e.g., an effector cell.

[0830] In some embodiments, the immune cell engager is a T cell engager, e.g., a T cell engager that mediates binding to and activation of a T cell, or a T cell engager that mediates binding to but not activation of a T cell. In some embodiments, the T cell engager binds to CD3, TCRα, TCRβ, TCRγ, TCRζ, ICOS, CD28, CD27, HVEM, LIGHT, CD40, 4-1BB, OX40, DR3, GITR, CD30, TIM1, SLAM, CD2, or CD226. In some embodiments, the T cell engager is an anti-CD3 antibody molecule. In some embodiments, the T cell engager is an anti-TCRβ antibody molecule. In some embodiments, the T cell engager binds to TCRβ V12 or TCRβ V6 (e.g., comprising the amino acid sequence of SEQ ID NO: 1044).

[0831] In some embodiments, the T cell engager comprises an anti-TCRvβ antibody molecule, e.g., as described herein. In some embodiments, the anti-TCRvβ antibody molecule comprises one or more amino acid sequences listed in Tables 1A, 2A, 3A, 10A, 11A, 12A, 13A, and 5, or a sequence with at least 80%, 85%, 90%, 92%, 95%, 97%, 98%, or 99% identity thereto. In some embodiments, the anti-TCRvβ antibody molecule comprises one, two, or three heavy chain complementarity determining regions (HC CDRs) and/or one, two, or three light chain complementarity determining regions (LC CDRs) of an anti-TCRvβ antigen binding domain disclosed in Tables 1A, 2A, 3A, 10A, 11A, 12A, 13A, and 5, or a sequence with at least 80%, 85%, 90%, 92%, 95%, 97%, 98%, or 99% identity thereto. In some embodiments, the anti-TCRvβ antibody molecule comprises one, two, or three HC CDRs and/or one, two, or three LC CDRs of an anti-TCRvβ antigen binding domain disclosed in SEQ ID NO: 1326, 1327, 1328, 1329, 1330, 1331, 1332, 1333, 1334, 1335, 1336, 110, 1337, 140, 143, 1343, 1338, 1339, 1340, 1341, 1342, 267, 269, 270, 271, or 272, or a sequence with at least 80%, 85%, 90%, 92%, 95%, 97%, 98%, or 99% identity thereto. In some embodiments, the anti-TCRvβ antibody molecule comprises a heavy chain variable region (VH) and/or a light chain variable region (VL) of an anti-TCRvβ antigen binding domain disclosed in Tables 1A, 2A, 3A, 10A, 11A, 12A, 13A, and 5 (e.g., a VH and/or a VL of an anti-TCRvβ antigen binding domain disclosed in SEQ ID NO: 1326, 1327, 1328, 1329, 1330, 1331, 1332, 1333, 1334, 1335, 1336, 110, 1337, 140, 143, 1343, 1338, 1339, 1340, 1341, 1342, 267, 269, 270, 271, or 272), or a sequence with at least 80%, 85%, 90%, 92%, 95%, 97%, 98%, or 99% identity thereto. In some embodiments, the anti-TCRvβ antibody molecule comprises an anti-TCRvβ antigen binding domain disclosed in Tables 1A, 2A, 3A, 10A, 11A, 12A, 13A, and 5 (e.g., an anti-TCRvβ antigen binding domain disclosed in SEQ ID NO: 1326, 1327, 1328, 1329, 1330, 1331, 1332, 1333, 1334, 1335, 1336, 110, 1337, 140, 143, 1343, 1338, 1339, 1340, 1341, 1342, 267, 269, 270, 271, or 272), or a sequence with at least 80%, 85%, 90%, 92%, 95%, 97%, 98%, or 99% identity thereto.

[0832] In some embodiments, the anti-TCRvβ antibody molecule comprises (a) a heavy chain variable region (VH) and/or a light chain variable region (VL), wherein: (i) the VH comprises a heavy chain complementarity determining region 1 (VHCDR1) amino acid sequence of SEQ ID NO: 3 (or a sequence with no more than 1, 2, 3, or 4 mutations, e.g., substitutions, additions, or deletions), a VHCDR2 amino acid sequence of SEQ ID NO: 4 (or a sequence with no more than 1, 2, 3, or 4 mutations, e.g., substitutions, additions, or deletions), and/or a VHCDR3 amino acid sequence of SEQ ID NO: 5 (or a sequence with no more than 1, 2, 3, or 4 mutations, e.g., substitutions, additions, or deletions), and/or (ii) the VL comprises a light chain complementarity determining region 1 (VHCDR1) amino acid sequence of SEQ ID NO: 6 (or a sequence with no more than 1, 2, 3, or 4 mutations, e.g., substitutions, additions, or deletions), a VHCDR2 amino acid sequence of SEQ ID NO: 7 (or a sequence with no more than 1, 2, 3, or 4 mutations, e.g., substitutions, additions, or deletions), and/or a VHCDR3 amino acid sequence of SEQ ID NO: 8 (or a sequence with no more than 1, 2, 3, or 4 mutations, e.g., substitutions, additions, or deletions); (b) a heavy chain variable region (VH) and/or a light chain variable region (VL), wherein: (i) the VH comprises a heavy chain complementarity determining region 1 (VHCDR1) amino acid sequence of SEQ ID NO: 255 (or a sequence with no more than 1, 2, 3, or 4 mutations, e.g., substitutions, additions, or deletions), a VHCDR2 amino acid sequence of SEQ ID NO: 46 (or a sequence with no more than 1, 2, 3, or 4 mutations, e.g., substitutions, additions, or deletions), and/or a VHCDR3 amino acid sequence of SEQ ID NO: 47 (or a sequence with no more than 1, 2, 3, or 4 mutations, e.g., substitutions, additions, or deletions), and/or (ii) the VL comprises a light chain complementarity determining region 1 (VHCDR1) amino acid sequence of SEQ ID NO: 51 (or a sequence with no more than 1, 2, 3, or 4 mutations, e.g., substitutions, additions, or deletions), a VHCDR2 amino acid sequence of SEQ ID NO: 52 (or a sequence with no more than 1, 2, 3, or 4 mutations, e.g., substitutions, additions, or deletions), and/or a VHCDR3 amino acid sequence of SEQ ID NO: 53 (or a sequence with no more than 1, 2, 3, or 4 mutations, e.g., substitutions, additions, or deletions); and/or (c) a heavy chain variable region (VH) and/or a light chain variable region (VL), wherein: (i) the VH comprises a heavy chain complementarity determining region 1 (VHCDR1) amino acid sequence of SEQ ID NO: 48 (or a sequence with no more than 1, 2, 3, or 4 mutations, e.g., substitutions, additions, or deletions), a VHCDR2 amino acid sequence of SEQ ID NO: 49 (or a sequence with no more than 1, 2, 3, or 4 mutations, e.g., substitutions, additions, or deletions), and/or a VHCDR3 amino acid sequence of SEQ ID NO: 50 (or a sequence with no more than 1, 2, 3, or 4 mutations, e.g., substitutions, additions, or deletions), and/or (ii) the VL comprises a light chain complementarity determining region 1 (VHCDR1) amino acid sequence of SEQ ID NO: 54 (or a sequence with no more than 1, 2, 3, or 4 mutations, e.g., substitutions, additions, or deletions), a VHCDR2 amino acid sequence of SEQ ID NO: 55 (or a sequence with no more than 1, 2, 3, or 4 mutations, e.g., substitutions, additions, or deletions), and/or a VHCDR3 amino acid sequence of SEQ ID NO: 56 (or a sequence with no more than 1, 2, 3, or 4 mutations, e.g., substitutions, additions, or deletions).

[0833] In some embodiments, the anti-TCRvβ antibody molecule comprises (a) a heavy chain variable region (VH) and/or a light chain variable region (VL), wherein: (i) the VH comprises the amino acid sequence of SEQ ID NO: 9 (or an amino acid sequence having at least about 77%, 80%, 85%, 90%, 95%, or 99% sequence identity thereto), and/or (ii) the VL comprises the amino acid sequence of SEQ ID NO: 10 (or an amino acid sequence having at least about 77%, 80%, 85%, 90%, 95%, or 99% sequence identity thereto); and/or (b) a heavy chain variable region (VH) and/or a light chain variable region (VL), wherein: (i) the VH comprises the amino acid sequence of SEQ ID NO: 9 (or an amino acid sequence having at least about 77%, 80%, 85%, 90%, 95%, or 99% sequence identity thereto), and/or (ii) the VL comprises the amino acid sequence of SEQ ID NO: 11 (or an amino acid sequence having at least about 77%, 80%, 85%, 90%, 95%, or 99% sequence identity thereto).

[0834] In some embodiments, the anti-TCRvβ antibody molecule comprises (a) a heavy chain variable region (VH) and/or a light chain variable region (VL), wherein: (i) the VH comprises a heavy chain complementarity determining region 1 (VHCDR1) amino acid sequence of SEQ ID NO: 152 (or a sequence with no more than 1, 2, 3, or 4 mutations, e.g., substitutions, additions, or deletions), a VHCDR2 amino acid sequence of SEQ ID NO: 226 (or a sequence with no more than 1, 2, 3, or 4 mutations, e.g., substitutions, additions, or deletions), and/or a VHCDR3 amino acid sequence of SEQ ID NO: 234 (or a sequence with no more than 1, 2, 3, or 4 mutations, e.g., substitutions, additions, or deletions), and/or (ii) the VL comprises a light chain complementarity determining region 1 (VHCDR1) amino acid sequence of SEQ ID NO: 235 (or a sequence with no more than 1, 2, 3, or 4 mutations, e.g., substitutions, additions, or deletions), a VHCDR2 amino acid sequence of SEQ ID NO: 236 (or a sequence with no more than 1, 2, 3, or 4 mutations, e.g., substitutions, additions, or deletions), and/or a VHCDR3 amino acid sequence of SEQ ID NO: 237 (or a sequence with no more than 1, 2, 3, or 4 mutations, e.g., substitutions, additions, or deletions); (b) a heavy chain variable region (VH) and/or a light chain variable region (VL), wherein: (i) the VH comprises a heavy chain complementarity determining region 1 (VHCDR1) amino acid sequence of SEQ ID NO: 57 (or a sequence with no more than 1, 2, 3, or 4 mutations, e.g., substitutions, additions, or deletions), a VHCDR2 amino acid sequence of SEQ ID NO: 58 (or a sequence with no more than 1, 2, 3, or 4 mutations, e.g., substitutions, additions, or deletions), and/or a VHCDR3 amino acid sequence of SEQ ID NO: 59 (or a sequence with no more than 1, 2, 3, or 4 mutations, e.g., substitutions, additions, or deletions), and/or (ii) the VL comprises a light chain complementarity determining region 1 (VHCDR1) amino acid sequence of SEQ ID NO: 235 (or a sequence with no more than 1, 2, 3, or 4 mutations, e.g., substitutions, additions, or deletions), a VHCDR2 amino acid sequence of SEQ ID NO: 64 (or a sequence with no more than 1, 2, 3, or 4 mutations, e.g., substitutions, additions, or deletions), and/or a VHCDR3 amino acid sequence of SEQ ID NO: 65 (or a sequence with no more than 1, 2, 3, or 4 mutations, e.g., substitutions, additions, or deletions); and/or (c) a heavy chain variable region (VH) and/or a light chain variable region (VL), wherein: (i) the VH comprises a heavy chain complementarity determining region 1 (VHCDR1) amino acid sequence of SEQ ID NO: 60 (or a sequence with no more than 1, 2, 3, or 4 mutations, e.g., substitutions, additions, or deletions), a VHCDR2 amino acid sequence of SEQ ID NO: 256 (or a sequence with no more than 1, 2, 3, or 4 mutations, e.g., substitutions, additions, or deletions), and/or a VHCDR3 amino acid sequence of SEQ ID NO: 234 (or a sequence with no more than 1, 2, 3, or 4 mutations, e.g., substitutions, additions, or deletions), and/or (ii) the VL comprises a light chain complementarity determining region 1 (VHCDR1) amino acid sequence of SEQ ID NO: 66 (or a sequence with no more than 1, 2, 3, or 4 mutations, e.g., substitutions, additions, or deletions), a VHCDR2 amino acid sequence of SEQ ID NO: 67 (or a sequence with no more than 1, 2, 3, or 4 mutations, e.g., substitutions, additions, or deletions), and/or a VHCDR3 amino acid sequence of SEQ ID NO: 68 (or a sequence with no more than 1, 2, 3, or 4 mutations, e.g., substitutions, additions, or deletions).

[0835] In some embodiments, the anti-TCRvβ antibody molecule comprises (a) a heavy chain variable region (VH) and/or a light chain variable region (VL), wherein: (i) the VH comprises the amino acid sequence of SEQ ID NO: 15 (or an amino acid sequence having at least about 77%, 80%, 85%, 90%, 95%, or 99% sequence identity thereto), and/or (ii) the VL comprises the amino acid sequence of SEQ ID NO: 16 (or an amino acid sequence having at least about 77%, 80%, 85%, 90%, 95%, or 99% sequence identity thereto); and/or (b) a heavy chain variable region (VH) and/or a light chain variable region (VL), wherein: (i) the VH comprises: the amino acid sequence of SEQ ID NO: 308 (or an amino acid sequence having at least about 77%, 80%, 85%, 90%, 95%, or 99% sequence identity thereto), the amino acid sequence of SEQ ID NO: 3438 (or an amino acid sequence having at least about 77%, 80%, 85%, 90%, 95%, or 99% sequence identity thereto), or the amino acid sequence of SEQ ID NO: 309 (or an amino acid sequence having at least about 77%, 80%, 85%, 90%, 95%, or 99% sequence identity thereto); and/or (ii) the VL comprises: the amino acid sequence of SEQ ID NO: 238 (or an amino acid sequence having at least about 77%, 80%, 85%, 90%, 95%, or 99% sequence identity thereto),the amino acid sequence of SEQ ID NO: 239 (or an amino acid sequence having at least about 77%, 80%, 85%, 90%, 95%, or 99% sequence identity thereto), the amino acid sequence of SEQ ID NO: 240 (or an amino acid sequence having at least about 77%, 80%, 85%, 90%, 95%, or 99% sequence identity thereto), the amino acid sequence of SEQ ID NO: 241 (or an amino acid sequence having at least about 77%, 80%, 85%, 90%, 95%, or 99% sequence identity thereto), or the amino acid sequence of SEQ ID NO: 242 (or an amino acid sequence having at least about 77%, 80%, 85%, 90%, 95%, or 99% sequence identity thereto).

[0836] In some embodiments, the immune cell engager is an NK cell engager, e.g., an NK cell engager that mediates binding to and activation of an NK cell, or an NK cell engager that mediates binding to but not activation of an NK cell. In some embodiments, the NK cell engager is chosen from an antibody molecule, e.g., an antigen binding domain, or ligand that binds to (e.g., activates): NKp30, NKp40, NKp44, NKp46, NKG2D, DNAM1, DAP10, CD16 (e.g., CD16a, CD16b, or both), CRTAM, CD27, PSGL1, CD96, CD100 (SEMA4D), NKp80, CD244 (also known as SLAMF4 or 2B4), SLAMF6, SLAMF7, KIR2DS2, KIR2DS4, KIR3DS1, KIR2DS3, KIR2DS5, KIR2DS1, CD94, NKG2C, NKG2E, or CD160. In some embodiments, the NK cell engager is an antibody molecule or ligand that binds to (e.g., activates) NKp30. In some embodiments, the NK cell engager is an antibody molecule, e.g., an antigen binding domain. In some embodiments, the NK cell engager is an antibody molecule, e.g., an antigen binding domain, that binds to NKp30 or NKp46. In some embodiments, the NK cell engager is a ligand, optionally, the ligand further comprises an immunoglobulin constant region, e.g., an Fc region. In some embodiments, the NK cell engager is a ligand of NKp44 or NKp46, e.g., a viral HA. In some embodiments, the NK cell engager is a ligand of DAP10, e.g., a coreceptor for NKG2D. In some embodiments, the NK cell engager is a ligand of CD16, e.g., a CD16a/b ligand, e.g., a CD16a/b ligand further comprising an antibody Fc region. In some embodiments, the NK cell engager comprises an anti-NKp30 antibody molecule.

[0837] In another aspect, provided herein is an antibody molecule or a multifunctional molecule comprising an anti-NKp30 antibody molecule disclosed herein.

[0838] In some embodiments, the anti-NKp30 antibody molecule comprises one or more amino acid sequences listed in Tables 6, 7, 8, 8A, 8B, 9, 10, and 18, or a sequence with at least 80%, 85%, 90%, 92%, 95%, 97%, 98%, or 99% identity thereto. In some embodiments, the anti-NKp30 antibody molecule comprises one, two, or three heavy chain complementarity determining regions (HC CDRs) and/or one, two, or three light chain complementarity determining regions (LC CDRs) of an anti-NKp30 antigen binding domain disclosed in Tables 6, 7, 8, 8A, 8B, 9, 10, and 18 (e.g., one, two, or three HC CDRs and/or one, two, or three LC CDRs of an anti-NKp30 antigen binding domain disclosed in SEQ ID NO: 6121-6153, 6187-6190, 275, 275, 275, 278, 281, 282, or 283). In some embodiments, the anti-NKp30 antibody molecule comprises a heavy chain variable region (VH) and/or a light chain variable region (VL) of an anti-NKp30 antigen binding domain disclosed in Tables 6, 7, 8, 8A, 8B, 9, 10, and 18 (e.g., a VH and/or a VL of an anti-NKp30 antigen binding domain disclosed in SEQ ID NO: 6121-6153, 6187-6190, 275, 275, 275, 278, 281, 282, or 283), or a sequence with at least 80%, 85%, 90%, 92%, 95%, 97%, 98%, or 99% identity thereto. In some embodiments, the anti-NKp30 antibody molecule comprises an anti-NKp30 antigen binding domain disclosed in Tables 6, 7, 8, 8A, 8B, 9, 10, and 18 (e.g., an anti-NKp30 antigen binding domain disclosed in SEQ ID NO: 6121-6153, 6187-6190, 275, 275, 275, 278, 281, 282, or 283), or a sequence with at least 80%, 85%, 90%, 92%, 95%, 97%, 98%, or 99% identity thereto. In some embodiments, the anti-NKp30 antibody molecule comprises a VH CDR1, VH CDR2, VH CDR3, VL CDR1, VL CDR2, and VL CDR3 comprising the amino acid sequences of SEQ ID NOs: 284, 6001, 7315, 7326, 7327, and 7329, respectively (or a sequence with at least 80%, 85%, 90%, 92%, 95%, 97%, 98%, or 99% identity thereto). In some embodiments, the anti-NKp30 antibody molecule comprises a VH comprising the amino acid sequence of SEQ ID NO: 7302 (or a sequence with at least 80%, 85%, 90%, 92%, 95%, 97%, 98%, or 99% identity thereto) and/or a VL comprising the amino acid sequence of SEQ ID NO: 7309 (or a sequence with at least 80%, 85%, 90%, 92%, 95%, 97%, 98%, or 99% identity thereto). In some embodiments, the anti-NKp30 antibody molecule comprises the amino acid sequence of SEQ ID NO: 7311 (or a sequence with at least 80%, 85%, 90%, 92%, 95%, 97%, 98%, or 99% identity thereto).

[0839] In some embodiments, the immune cell engager comprises a B cell, macrophage, and/or dendritic cell engager chosen from one or more of CD40 ligand (CD40L) or a CD70 ligand; an antibody molecule that binds to CD40 or CD70; an antibody molecule to OX40; an OX40 ligand (OX40L); an agonist of a Toll-like receptor (e.g., a TLR4, e.g., a constitutively active TLR4 (caTLR4) or a TLR9 agonist); a 41BB; a CD2 agonist; a CD47; or a STING agonist, or a combination thereof. In some embodiments, the immune cell engager is a B cell engager, e.g., a CD40L, an OX40L, or a CD70 ligand, or an antibody molecule that binds to OX40, CD40 or CD70. In some embodiments, the immune cell engager is a macrophage cell engager, e.g., a CD2 agonist; a CD40L; an OX40L; an antibody molecule that binds to OX40, CD40 or CD70; an agonist of a Toll-like receptor (TLR) (e.g., a TLR4, e.g., a constitutively active TLR4 (caTLR4) or a TLR9 agonist); CD47; or a STING agonist. In some embodiments, the immune cell engager is a dendritic cell engager, e.g., a CD2 agonist, an OX40 antibody, an OX40L, 41BB agonist, a Toll-like receptor agonist or a fragment thereof (e.g., a TLR4, e.g., a constitutively active TLR4 (caTLR4)), CD47 agonist, or a STING agonist. In some embodiments, the STING agonist comprises a cyclic dinucleotide, e.g., a cyclic di-GMP (cdGMP), a cyclic di-AMP (cdAMP), or a combination thereof, optionally with 2′,5′ or 3′,5′ phosphate linkages, e.g., wherein the STING agonist is covalently coupled to the multifunctional molecule.

[0840] In some embodiments, the multifunctional molecule comprises a cytokine molecule or a modulator thereof. In some embodiments, the cytokine molecule is chosen from interleukin-2 (IL-2), interleukin-7 (IL-7), interleukin-12 (IL-12), interleukin-15 (IL-15), interleukin-18 (IL-18), interleukin-21 (IL-21), or interferon gamma, or a fragment or variant thereof, or a combination of any of the aforesaid cytokines. In some embodiments, the cytokine molecule is a monomer or a dimer. In some embodiments, the cytokine molecule further comprises a receptor dimerizing domain, e.g., an IL15Ralpha dimerizing domain. In some embodiments, the cytokine molecule (e.g., IL-15) and the receptor dimerizing domain (e.g., an IL15Ralpha dimerizing domain) are not covalently linked, e.g., are non-covalently associated. In some embodiments, the modulator of the cytokine molecule comprises a TGF-β inhibitor.

[0841] In some embodiments, the multifunctional molecule comprises an IL-2 molecule. In some embodiments, the multifunctional molecule comprises an IL-2 molecule comprising an IL-2 sequence disclosed in Tables 5 and 6, or a sequence with at least 80%, 85%, 90%, 92%, 95%, 97%, 98%, or 99% identity thereto. In some embodiments, the multifunctional molecule comprises an IL-2 molecule comprising a F42A substitution and/or a Y45A substitution.

[0842] In some embodiments, the multifunctional molecule comprises one antigen binding domain that binds to CD33 and one immune cell engager (e.g., one antigen binding domain that binds to TCRvβ or NKp30). In some embodiments, the multifunctional molecule comprises one antigen binding domain that binds to CD33 and two immune cell engagers (e.g., two antigen binding domains that bind to TCRvβ or NKp30). In some embodiments, the multifunctional molecule comprises two antigen binding domains that bind to CD33 and one immune cell engager (e.g., one antigen binding domain that binds to TCRvβ or NKp30). In some embodiments, the multifunctional molecule comprises two antigen binding domains that bind to CD33 and two immune cell engagers (e.g., two antigen binding domains that bind to TCRvβ or NKp30). In some embodiments, the multifunctional molecule further comprises one or two cytokine molecules (e.g., one or two IL-2 molecules).

[0843] In some embodiments, (i) the antigen binding domain that binds to CD33 comprises a Fab region comprising a VH and a VL; and (ii) the antigen binding domain that binds to TCRvβ or NKp30 comprises a scFv region, e.g., a scFv region that is linked to the VH or VL of the antigen binding domain that binds to CD33, e.g., a scFv region that is linked to the VH (e.g., the N-terminus of the VH) of the antigen binding domain that binds to CD33, e.g., through a linker. In some embodiments, the linker comprises Gly and Ser. In some embodiments, the linker comprises an amino acid sequence chosen from SEQ ID NOs: 42-45 or 75-78.

[0844] In some embodiments, the multifunctional molecule comprises a first chain comprising a VH of the antigen binding domain that binds to CD33 fused to a heavy chain constant region (e.g., CH1, CH2, and CH3), a second chain comprising a VL of the antigen binding domain that binds to CD33 fused to a light chain constant region, and a third chain comprising the antigen binding domain that binds to TCRvβ or NKp30 (e.g., a scFv region that binds to TCRvβ or NKp30) fused to a heavy chain constant region (e.g., CH2 and CH3). In some embodiments, the first chain further comprises an IL-2 molecule, e.g., at the C-terminus of the heavy chain constant region (e.g., CH3). In some embodiments, the second chain further comprises an IL-2 molecule, e.g., at the C-terminus of the light chain constant region. In some embodiments, the third chain further comprises an IL-2 molecule, e.g., at the N-terminus of the antigen binding domain that binds to TCRvβ or NKp30 (e.g., the scFv that binds to TCRvβ or NKp30). In some embodiments, the third chain further comprises an IL-2 molecule, e.g., between the antigen binding domain that binds to TCRvβ or NKp30 (e.g., a scFv region that binds to TCRvβ or NKp30) and the heavy chain constant region (e.g., CH2). In some embodiments, the third chain further comprises an IL-2 molecule, e.g., at the C-terminus of the heavy chain constant region (e.g., CH3).

[0845] In some embodiments, the multifunctional molecule comprises an antigen binding domain that binds to CD33 and an antigen binding domain that binds to TCRvβ. In some embodiments, the multifunctional molecule comprises an amino acid sequence disclosed in Table 5, or a sequence with at least 80%, 85%, 90%, 92%, 95%, 97%, 98%, or 99% identity thereto. In some embodiments, the multifunctional molecule comprises (i) SEQ ID NO: 267 (or a sequence with at least 80%, 85%, 90%, 92%, 95%, 97%, 98%, or 99% identity thereto) and/or SEQ ID NO: 268 (or a sequence with at least 80%, 85%, 90%, 92%, 95%, 97%, 98%, or 99% identity thereto); (ii) SEQ ID NO: 269 (or a sequence with at least 80%, 85%, 90%, 92%, 95%, 97%, 98%, or 99% identity thereto) and/or SEQ ID NO: 268 (or a sequence with at least 80%, 85%, 90%, 92%, 95%, 97%, 98%, or 99% identity thereto); (iii) SEQ ID NO: 270 (or a sequence with at least 80%, 85%, 90%, 92%, 95%, 97%, 98%, or 99% identity thereto) and/or SEQ ID NO: 268 (or a sequence with at least 80%, 85%, 90%, 92%, 95%, 97%, 98%, or 99% identity thereto); (iv) SEQ ID NO: 271 (or a sequence with at least 80%, 85%, 90%, 92%, 95%, 97%, 98%, or 99% identity thereto) and/or SEQ ID NO: 268 (or a sequence with at least 80%, 85%, 90%, 92%, 95%, 97%, 98%, or 99% identity thereto); or (v) SEQ ID NO: 272 (or a sequence with at least 80%, 85%, 90%, 92%, 95%, 97%, 98%, or 99% identity thereto) and/or SEQ ID NO: 268 (or a sequence with at least 80%, 85%, 90%, 92%, 95%, 97%, 98%, or 99% identity thereto).

[0846] In some embodiments, the multifunctional molecule comprises an antigen binding domain that binds to CD33, an antigen binding domain that binds to TCRvβ, and an IL-2 molecule. In some embodiments, the multifunctional molecule comprises an amino acid sequence disclosed in Table 5, or a sequence with at least 80%, 85%, 90%, 92%, 95%, 97%, 98%, or 99% identity thereto. In some embodiments, the multifunctional molecule comprises SEQ ID NO: 271 (or a sequence with at least 80%, 85%, 90%, 92%, 95%, 97%, 98%, or 99% identity thereto) and/or SEQ ID NO: 273 (or a sequence with at least 80%, 85%, 90%, 92%, 95%, 97%, 98%, or 99% identity thereto).

[0847] In some embodiments, the multifunctional molecule comprises an antigen binding domain that binds to CD33 and an antigen binding domain that binds to NKp30. In some embodiments, the multifunctional molecule comprises an amino acid sequence disclosed in Table 6, or a sequence with at least 80%, 85%, 90%, 92%, 95%, 97%, 98%, or 99% identity thereto. In some embodiments, the multifunctional molecule comprises (i) SEQ ID NO: 274 (or a sequence with at least 80%, 85%, 90%, 92%, 95%, 97%, 98%, or 99% identity thereto), SEQ ID NO: 268 (or a sequence with at least 80%, 85%, 90%, 92%, 95%, 97%, 98%, or 99% identity thereto), and/or SEQ ID NO: 275 (or a sequence with at least 80%, 85%, 90%, 92%, 95%, 97%, 98%, or 99% identity thereto); or (ii) SEQ ID NO: 277 (or a sequence with at least 80%, 85%, 90%, 92%, 95%, 97%, 98%, or 99% identity thereto), SEQ ID NO: 268 (or a sequence with at least 80%, 85%, 90%, 92%, 95%, 97%, 98%, or 99% identity thereto), and/or SEQ ID NO: 278 (or a sequence with at least 80%, 85%, 90%, 92%, 95%, 97%, 98%, or 99% identity thereto).

[0848] In some embodiments, the multifunctional molecule comprises an antigen binding domain that binds to CD33, an antigen binding domain that binds to NKp30, and an IL-2 molecule. In some embodiments, the multifunctional molecule comprises an amino acid sequence disclosed in Table 6, or a sequence with at least 80%, 85%, 90%, 92%, 95%, 97%, 98%, or 99% identity thereto. In some embodiments, the multifunctional molecule comprises (i) SEQ ID NO: 274 (or a sequence with at least 80%, 85%, 90%, 92%, 95%, 97%, 98%, or 99% identity thereto), SEQ ID NO: 273 (or a sequence with at least 80%, 85%, 90%, 92%, 95%, 97%, 98%, or 99% identity thereto), and/or SEQ ID NO: 275 (or a sequence with at least 80%, 85%, 90%, 92%, 95%, 97%, 98%, or 99% identity thereto); (ii) SEQ ID NO: 274 (or a sequence with at least 80%, 85%, 90%, 92%, 95%, 97%, 98%, or 99% identity thereto), SEQ ID NO: 276 (or a sequence with at least 80%, 85%, 90%, 92%, 95%, 97%, 98%, or 99% identity thereto), and/or SEQ ID NO: 275 (or a sequence with at least 80%, 85%, 90%, 92%, 95%, 97%, 98%, or 99% identity thereto); (iii) SEQ ID NO: 279 (or a sequence with at least 80%, 85%, 90%, 92%, 95%, 97%, 98%, or 99% identity thereto), SEQ ID NO: 280 (or a sequence with at least 80%, 85%, 90%, 92%, 95%, 97%, 98%, or 99% identity thereto), and/or SEQ ID NO: 281 (or a sequence with at least 80%, 85%, 90%, 92%, 95%, 97%, 98%, or 99% identity thereto); (iv) SEQ ID NO: 279 (or a sequence with at least 80%, 85%, 90%, 92%, 95%, 97%, 98%, or 99% identity thereto), SEQ ID NO: 280 (or a sequence with at least 80%, 85%, 90%, 92%, 95%, 97%, 98%, or 99% identity thereto), and/or SEQ ID NO: 282 (or a sequence with at least 80%, 85%, 90%, 92%, 95%, 97%, 98%, or 99% identity thereto); or (v) SEQ ID NO: 279 (or a sequence with at least 80%, 85%, 90%, 92%, 95%, 97%, 98%, or 99% identity thereto), SEQ ID NO: 280 (or a sequence with at least 80%, 85%, 90%, 92%, 95%, 97%, 98%, or 99% identity thereto), and/or SEQ ID NO: 283 (or a sequence with at least 80%, 85%, 90%, 92%, 95%, 97%, 98%, or 99% identity thereto).

[0849] In some embodiments, the multifunctional molecule comprises one or more immunoglobulin chain constant regions (e.g., Fc regions) comprising one or more of: a paired cavity-protuberance (“knob-in-a hole”), an electrostatic interaction, or a strand-exchange. In some embodiments, the multifunctional molecule comprises one or more immunoglobulin chain constant regions (e.g., Fc regions) comprising an amino acid substitution at a position chosen from one or more of 347, 349, 350, 351, 366, 368, 370, 392, 394, 395, 397, 398, 399, 405, 407, or 409, e.g., of the Fc region of human IgG1, optionally wherein the one or more immunoglobulin chain constant regions (e.g., Fc regions) comprise an amino acid substitution chosen from: T366S, L368A, or Y407V (e.g., corresponding to a cavity or hole), or T366W (e.g., corresponding to a protuberance or knob), or a combination thereof.

[0850] In some embodiments, the multifunctional molecule comprises one or more immunoglobulin chain constant regions (e.g., Fc regions) that has reduced effector function (e.g., reduced ADCC, ADCP and/or CDC), reduced binding to one or more Fc receptors, and/or reduced binding to C1q complement, e.g., compared to a wildtype immunoglobulin chain constant region (e.g., a wildtype Fc region). In some embodiments, the multifunctional molecule comprises one or more immunoglobulin chain constant regions (e.g., Fc regions) comprising a modification or mutation disclosed in Table 21A, e.g., an Asn297Ala (N297A) mutation or a Leu234Ala/Leu235Ala (LALA) mutation.

[0851] In some embodiments, the multifunctional molecule comprises a stromal modifying moiety. In some embodiments, the stromal modifying moiety causes one or more of: decreases the level or production of a stromal or extracellular matrix (ECM) component; decreases tumor fibrosis; increases interstitial tumor transport; improves tumor perfusion; expands the tumor microvasculature; decreases interstitial fluid pressure (IFP) in a tumor; or decreases or enhances penetration or diffusion of an agent, e.g., a cancer therapeutic or a cellular therapy, into a tumor or tumor vasculature. In some embodiments, the stromal or ECM component decreased is chosen from a glycosaminoglycan or an extracellular protein, or a combination thereof. In some embodiments, the glycosaminoglycan is chosen from hyaluronan (also known as hyaluronic acid or HA), chondroitin sulfate, chondroitin, dermatan sulfate, heparan sulfate, heparin, entactin, tenascin, aggrecan or keratin sulfate. In some embodiments, the extracellular protein is chosen from collagen, laminin, elastin, fibrinogen, fibronectin, or vitronectin. In some embodiments, the stromal modifying moiety comprises an enzyme molecule that degrades a tumor stroma or extracellular matrix (ECM). In some embodiments, the enzyme molecule is chosen from a hyaluronidase molecule, a collagenase molecule, a chondroitinase molecule, a matrix metalloproteinase molecule (e.g., macrophage metalloelastase), or a variant (e.g., a fragment) of any of the aforesaid. In some embodiments, the stromal modifying moiety decreases the level or production of hyaluronic acid. In some embodiments, the stromal modifying moiety comprises a hyaluronan degrading enzyme, an agent that inhibits hyaluronan synthesis, or an antibody molecule against hyaluronic acid. In some embodiments, the hyaluronan degrading enzyme is a hyaluronidase molecule or a variant (e.g., fragment thereof) thereof. In some embodiments, the hyaluronan degrading enzyme is active in neutral or acidic pH, e.g., pH of about 4-5. In some embodiments, the hyaluronidase molecule is a mammalian hyaluronidase molecule, e.g., a recombinant human hyaluronidase molecule, or a variant thereof (e.g., a truncated form thereof). In some embodiments, the hyaluronidase molecule is chosen from HYAL1, HYAL2, or PH-20/SPAM1, or a variant thereof (e.g., a truncated form thereof). In some embodiments, the truncated form lacks a C-terminal glycosylphosphatidylinositol (GPI) attachment site or a portion of the GPI attachment site. In some embodiments, the hyaluronidase molecule is glycosylated, e.g., comprises at least one N-linked glycan. In some embodiments, the hyaluronidase molecule comprises the amino acid sequence of SEQ ID NO:61, or a fragment thereof, or an amino acid sequence substantially identical thereto (e.g., 95% to 99.9% identical thereto, or having at least one amino acid alteration, but not more than five, ten or fifteen alterations (e.g., substitutions, deletions, or insertions, e.g., conservative substitutions) to the amino acid sequence of SEQ ID NO: 61). In some embodiments, the hyaluronidase molecule comprises the amino acid residues 36-464 of SEQ ID NO: 61. In some embodiments, the hyaluronidase molecule comprises the amino acid residues 36-481, 36-482, or 36-483 of PH20, wherein PH20 has the amino acid sequence of SEQ ID NO: 61. In some embodiments, the hyaluronidase molecule comprises an amino acid sequence having at least 95% to 100% sequence identity to the polypeptide or truncated form of the amino acid sequence of SEQ ID NO: 61. In some embodiments, the hyaluronidase molecule comprises an amino acid sequence having 30, 20, 10, 5 or fewer amino acid substitutions to the amino acid sequence of SEQ ID NO: 61. In some embodiments, the hyaluronidase molecule comprises an amino acid sequence at least 95% (e.g., at least 95%, 96%, 97%, 98%, 99%, 100%) identical to the amino acid sequence of SEQ ID NO: 61. In some embodiments, the hyaluronidase molecule is encoded by a nucleotide sequence at least 95% (e.g., at least 96%, 97%, 98%, 99%, 100%) identical to the nucleotide sequence of SEQ ID NO: 61. In some embodiments, the hyaluronidase molecule is PH20, e.g., rHuPH20. In some embodiments, the hyaluronidase molecule is HYAL1 and comprises the amino acid sequence of SEQ ID NO: 62, or a fragment thereof, or an amino acid sequence substantially identical thereto (e.g., 95% to 99.9% identical thereto, or having at least one amino acid alteration, but not more than five, ten or fifteen alterations (e.g., substitutions, deletions, or insertions, e.g., conservative substitutions) to the amino acid sequence of SEQ ID NO: 62). In some embodiments, the hyaluronan degrading enzyme, e.g., the hyaluronidase molecule, further comprises a polymer, e.g., is conjugated to a polymer, e.g., PEG. In some embodiments, the hyaluronan-degrading enzyme is a PEGylated PH20 enzyme (PEGPH20). In some embodiments, the hyaluronan degrading enzyme, e.g., the hyaluronidase molecule, further comprises an immunoglobulin chain constant region (e.g., Fc region) chosen from, e.g., the heavy chain constant regions of IgG1, IgG2, IgG3, or IgG4, more particularly, the heavy chain constant region of human IgG1, IgG2, IgG3, or IgG4. In some embodiments, the immunoglobulin constant region (e.g., the Fc region) is linked, e.g., covalently linked to, the hyaluronan degrading enzyme, e.g., the hyaluronidase molecule. In some embodiments, the immunoglobulin chain constant region (e.g., Fc region) is altered, e.g., mutated, to increase or decrease one or more of: Fc receptor binding, antibody glycosylation, the number of cysteine residues, effector cell function, or complement function. In some embodiments, the hyaluronan degrading enzyme, e.g., the hyaluronidase molecule, forms a dimer. In some embodiments, the stromal modifying moiety comprises an inhibitor of the synthesis of hyaluronan, e.g., an HA synthase. In some embodiments, the inhibitor comprises a sense or an antisense nucleic acid molecule against an HA synthase or is a small molecule drug. In some embodiments, the inhibitor is 4-methylumbelliferone (MU) or a derivative thereof (e.g., 6,7-dihydroxy-4-methyl coumarin or 5,7-dihydroxy-4-methyl coumarin), or leflunomide or a derivative thereof. In some embodiments, the stromal modifying moiety comprises a collagenase molecule, e.g., a mammalian collagenase molecule, or a variant (e.g., fragment) thereof. In some embodiments, the collagenase molecule is collagenase molecule IV, e.g., comprising the amino acid sequence of SEQ ID NO: 63, or a fragment thereof, or an amino acid sequence substantially identical thereto (e.g., 95% to 99.9% identical thereto, or having at least one amino acid alteration, but not more than five, ten or fifteen alterations (e.g., substitutions, deletions, or insertions, e.g., conservative substitutions) to the amino acid sequence of SEQ ID NO: 63.

[0852] In some embodiments, the multifunctional molecule further comprises a linker, e.g., a linker between one or more of: the antigen binding domain that binds to CD33, the immune cell engager, the cytokine molecule, a heavy chain constant region, and a light chain constant region. In some embodiments, the linker is chosen from: a cleavable linker, a non-cleavable linker, a peptide linker, a flexible linker, a rigid linker, a helical linker, or a non-helical linker. In some embodiments, the linker is a peptide linker. In some embodiments, the peptide linker comprises Gly and Ser. In some embodiments, the peptide linker comprises an amino acid sequence chosen from SEQ ID NOs: 42-45 or 75-78.

[0853] In another aspect, the disclosure provides an isolated nucleic acid molecule encoding any multispecific or multifunctional molecule described herein. In another aspect, the disclosure provides an isolated nucleic acid molecule, which comprises the nucleotide sequence encoding any of the multispecific or multifunctional molecules described herein, or a nucleotide sequence substantially homologous thereto (e.g., at least 80%, 90%, 95%, or 99.9% identical thereto). In another aspect, the disclosure provides an isolated vector comprising a nucleic acid molecule described herein. In another aspect, the disclosure provides an isolated cell comprising a nucleic acid molecule or a vector described herein.

[0854] In another aspect, the disclosure provides a method of making, e.g., producing, a multispecific or multifunctional molecule polypeptide described herein, comprising culturing a host cell described herein, under suitable conditions, e.g., conditions suitable for gene expression and/or homo- or heterodimerization.

[0855] In another aspect, the disclosure provides a pharmaceutical composition comprising a multispecific or multifunctional molecule polypeptide described herein and a pharmaceutically acceptable carrier, excipient, or stabilizer.

[0856] In another aspect, the disclosure provides a method of treating a cancer, comprising administering to a subject in need thereof a multispecific or multifunctional molecule polypeptide described herein, wherein the multispecific antibody is administered in an amount effective to treat the cancer. In some embodiments, the subject has cancer cells that express CD33. In some embodiments, the cancer is a hematological cancer. In some embodiments, the cancer is a myeloid leukemia. In some embodiments, the cancer is chosen from: acute myeloblastic leukemia, acute myelomonocytic leukemia, juvenile myelomonocytic leukemia, chronic myelomonocytic leukemia, acute basophilic leukemia, acute eosinophilic leukemia, chronic eosinophilic leukemia, acute biphenotypic leukaemia, acute megakaryoblastic leukemia, acute erythroid leukemia, acute panmyeloic leukemia, chronic neutrophilic leukemia, myeloid dendritic cell leukemia, accelerated phase chronic myelogenous leukemia, essential thrombocytosis, polycythemia vera, myelodysplastic syndrome, or myeloid sarcoma.

[0857] In some embodiments, the method further comprises administering a second therapeutic treatment. In some embodiments, second therapeutic treatment comprises a therapeutic agent (e.g., a chemotherapeutic agent, a biologic agent, hormonal therapy), radiation, or surgery. In some embodiments, therapeutic agent is selected from: a chemotherapeutic agent, or a biologic agent.

[0858] In some aspects, provided herein is, inter alia, a multifunctional molecule (e.g., an isolated multifunctional molecule) comprising:

(i) a first antigen binding domain that binds to CD33, and
(ii) one or both of:
(a) an immune cell engager chosen from a T cell engager (e.g., a second antigen binding domain that binds to TCRvβ, e.g., as described herein), an NK cell engager (e.g., a second antigen binding domain that binds to NKp30, e.g., as described herein), a B cell engager, a dendritic cell engager, or a macrophage cell engager; or
(b) a cytokine molecule (e.g., an IL-2 molecule, e.g., as described herein).

[0859] In some embodiments, the multifunctional molecule as provided herein comprises (i) and (ii)(a).

[0860] In some embodiments, the multifunctional molecule as provided herein comprises (i), (ii)(a), and (ii)(b).

[0861] In some embodiments, the first antigen binding domain comprises:

(i) one, two, or three heavy chain complementarity determining regions (HC CDRs) and/or one, two, or three light chain complementarity determining regions (LC CDRs) of an anti-CD33 antigen binding domain disclosed in Tables 5 and 6 (e.g., one, two, or three HC CDRs and/or one, two, or three LC CDRs of an anti-CD33 antigen binding domain disclosed in SEQ ID NOs: 267-283);
(ii) a heavy chain variable region (VH) and/or a light chain variable region (VL) of an anti-CD33 antigen binding domain disclosed in Tables 5 and 6 (e.g., a VH and/or a VL of an anti-CD33 antigen binding domain disclosed in SEQ ID NOs: 267-283), or a sequence with at least 80%, 85%, 90%, 92%, 95%, 97%, 98%, or 99% identity thereto; or
(iii) an anti-CD33 antigen binding domain disclosed in Tables 5 and 6 (e.g., an anti-CD33 antigen binding domain disclosed in SEQ ID NOs: 267-283), or a sequence with at least 80%, 85%, 90%, 92%, 95%, 97%, 98%, or 99% identity thereto.

[0862] In some embodiments, the multifunctional molecule comprises an immune cell engager chosen from a T cell engager (e.g., a second antigen binding domain that binds to TCRvβ, e.g., as described herein), an NK cell engager (e.g., a second antigen binding domain that binds to NKp30, e.g., as described herein), a B cell engager, a dendritic cell engager, or a macrophage cell engager.

[0863] In some embodiments, the immune cell engager binds to and activates an immune cell, e.g., an effector cell.

[0864] In some embodiments, the immune cell engager binds to, but does not activate, an immune cell, e.g., an effector cell.

[0865] In some embodiments, the immune cell engager is a T cell engager, e.g., a T cell engager that mediates binding to and activation of a T cell, or a T cell engager that mediates binding to but not activation of a T cell.

[0866] In some embodiments, the T cell engager binds to TCRVβ, CD3, TCRα, TCRβ, TCRγ, TCRζ, ICOS, CD28, CD27, HVEM, LIGHT, CD40, 4-1BB, OX40, DR3, GITR, CD30, TIM1, SLAM, CD2, or CD226, e.g., the T cell engager is an anti-TCRβ antibody molecule.

[0867] In some embodiments, the T cell engager binds to TCRVβ.

[0868] In some embodiments, the T cell engager binds to TCRβ V12 or TCRβ V6 (e.g., comprising the amino acid sequence of SEQ ID NO: 1044).

[0869] In some embodiments, the T cell engager comprises an anti-TCRVβ antibody molecule, e.g., as described herein, e.g., comprising one or more amino acid sequences listed in Tables 1A, 2A, 3A, 10A, 11A, 12A, 13A, and 5, or a sequence with at least 80%, 85%, 90%, 92%, 95%, 97%, 98%, or 99% identity thereto, e.g., wherein the T cell engager comprises:

(i) one, two, or three heavy chain complementarity determining regions (HC CDRs) and/or one, two, or three light chain complementarity determining regions (LC CDRs) of an anti-TCRvβ antigen binding domain disclosed in Tables 1A, 2A, 3A, 10A, 11A, 12A, 13A, and 5 (e.g., one, two, or three HC CDRs and/or one, two, or three LC CDRs of an anti-TCRvβ antigen binding domain disclosed in SEQ ID NO: 1326, 1327, 1328, 1329, 1330, 1331, 1332, 1333, 1334, 1335, 1336, 110, 1337, 140, 143, 1343, 1338, 1339, 1340, 1341, 1342, 267, 269, 270, 271, or 272);
(ii) a heavy chain variable region (VH) and/or a light chain variable region (VL) of an anti-TCRvβ antigen binding domain disclosed in Tables 1A, 2A, 3A, 10A, 11A, 12A, 13A, and 5 (e.g., a VH and/or a VL of an anti-TCRvβ antigen binding domain disclosed in SEQ ID NO: 1326, 1327, 1328, 1329, 1330, 1331, 1332, 1333, 1334, 1335, 1336, 110, 1337, 140, 143, 1343, 1338, 1339, 1340, 1341, 1342, 267, 269, 270, 271, or 272), or a sequence with at least 80%, 85%, 90%, 92%, 95%, 97%, 98%, or 99% identity thereto; or
(iii) an anti-TCRvβ antigen binding domain disclosed in Tables 1A, 2A, 3A, 10A, 11A, 12A, 13A, and 5 (e.g., an anti-TCRvβ antigen binding domain disclosed in SEQ ID NO: 1326, 1327, 1328, 1329, 1330, 1331, 1332, 1333, 1334, 1335, 1336, 110, 1337, 140, 143, 1343, 1338, 1339, 1340, 1341, 1342, 267, 269, 270, 271, or 272), or a sequence with at least 80%, 85%, 90%, 92%, 95%, 97%, 98%, or 99% identity thereto.

[0870] In some embodiments, the T cell engager comprises:

(a) a heavy chain variable region (VH) and/or a light chain variable region (VL), wherein:
(i) the VH comprises a heavy chain complementarity determining region 1 (VHCDR1) amino acid sequence of SEQ ID NO: 3 (or a sequence with no more than 1, 2, 3, or 4 mutations, e.g., substitutions, additions, or deletions), a VHCDR2 amino acid sequence of SEQ ID NO: 4 (or a sequence with no more than 1, 2, 3, or 4 mutations, e.g., substitutions, additions, or deletions), and/or a VHCDR3 amino acid sequence of SEQ ID NO: 5 (or a sequence with no more than 1, 2, 3, or 4 mutations, e.g., substitutions, additions, or deletions), and/or
(ii) the VL comprises a light chain complementarity determining region 1 (VHCDR1) amino acid sequence of SEQ ID NO: 6 (or a sequence with no more than 1, 2, 3, or 4 mutations, e.g., substitutions, additions, or deletions), a VHCDR2 amino acid sequence of SEQ ID NO: 7 (or a sequence with no more than 1, 2, 3, or 4 mutations, e.g., substitutions, additions, or deletions), and/or a VHCDR3 amino acid sequence of SEQ ID NO: 8 (or a sequence with no more than 1, 2, 3, or 4 mutations, e.g., substitutions, additions, or deletions);
(b) a heavy chain variable region (VH) and/or a light chain variable region (VL), wherein:
(i) the VH comprises a heavy chain complementarity determining region 1 (VHCDR1) amino acid sequence of SEQ ID NO: 255 (or a sequence with no more than 1, 2, 3, or 4 mutations, e.g., substitutions, additions, or deletions), a VHCDR2 amino acid sequence of SEQ ID NO: 46 (or a sequence with no more than 1, 2, 3, or 4 mutations, e.g., substitutions, additions, or deletions), and/or a VHCDR3 amino acid sequence of SEQ ID NO: 47 (or a sequence with no more than 1, 2, 3, or 4 mutations, e.g., substitutions, additions, or deletions), and/or
(ii) the VL comprises a light chain complementarity determining region 1 (VHCDR1) amino acid sequence of SEQ ID NO: 51 (or a sequence with no more than 1, 2, 3, or 4 mutations, e.g., substitutions, additions, or deletions), a VHCDR2 amino acid sequence of SEQ ID NO: 52 (or a sequence with no more than 1, 2, 3, or 4 mutations, e.g., substitutions, additions, or deletions), and/or a VHCDR3 amino acid sequence of SEQ ID NO: 53 (or a sequence with no more than 1, 2, 3, or 4 mutations, e.g., substitutions, additions, or deletions); and/or
(c) a heavy chain variable region (VH) and/or a light chain variable region (VL), wherein:
(i) the VH comprises a heavy chain complementarity determining region 1 (VHCDR1) amino acid sequence of SEQ ID NO: 48 (or a sequence with no more than 1, 2, 3, or 4 mutations, e.g., substitutions, additions, or deletions), a VHCDR2 amino acid sequence of SEQ ID NO: 49 (or a sequence with no more than 1, 2, 3, or 4 mutations, e.g., substitutions, additions, or deletions), and/or a VHCDR3 amino acid sequence of SEQ ID NO: 50 (or a sequence with no more than 1, 2, 3, or 4 mutations, e.g., substitutions, additions, or deletions), and/or
(ii) the VL comprises a light chain complementarity determining region 1 (VHCDR1) amino acid sequence of SEQ ID NO: 54 (or a sequence with no more than 1, 2, 3, or 4 mutations, e.g., substitutions, additions, or deletions), a VHCDR2 amino acid sequence of SEQ ID NO: 55 (or a sequence with no more than 1, 2, 3, or 4 mutations, e.g., substitutions, additions, or deletions), and/or a VHCDR3 amino acid sequence of SEQ ID NO: 56 (or a sequence with no more than 1, 2, 3, or 4 mutations, e.g., substitutions, additions, or deletions).

[0871] In some embodiments, the T cell engager comprises:

(a) a heavy chain variable region (VH) and/or a light chain variable region (VL), wherein:
(i) the VH comprises the amino acid sequence of SEQ ID NO: 9 (or an amino acid sequence having at least about 77%, 80%, 85%, 90%, 95%, or 99% sequence identity thereto), and/or
(ii) the VL comprises the amino acid sequence of SEQ ID NO: 10 (or an amino acid sequence having at least about 77%, 80%, 85%, 90%, 95%, or 99% sequence identity thereto); and/or
(b) a heavy chain variable region (VH) and/or a light chain variable region (VL), wherein:
(i) the VH comprises the amino acid sequence of SEQ ID NO: 9 (or an amino acid sequence having at least about 77%, 80%, 85%, 90%, 95%, or 99% sequence identity thereto), and/or
(ii) the VL comprises the amino acid sequence of SEQ ID NO: 11 (or an amino acid sequence having at least about 77%, 80%, 85%, 90%, 95%, or 99% sequence identity thereto).

[0872] In some embodiments, the T cell engager comprises:

(a) a heavy chain variable region (VH) and/or a light chain variable region (VL), wherein:
(i) the VH comprises a heavy chain complementarity determining region 1 (VHCDR1) amino acid sequence of SEQ ID NO: 152 (or a sequence with no more than 1, 2, 3, or 4 mutations, e.g., substitutions, additions, or deletions), a VHCDR2 amino acid sequence of SEQ ID NO: 226 (or a sequence with no more than 1, 2, 3, or 4 mutations, e.g., substitutions, additions, or deletions), and/or a VHCDR3 amino acid sequence of SEQ ID NO: 234 (or a sequence with no more than 1, 2, 3, or 4 mutations, e.g., substitutions, additions, or deletions), and/or
(ii) the VL comprises a light chain complementarity determining region 1 (VHCDR1) amino acid sequence of SEQ ID NO: 235 (or a sequence with no more than 1, 2, 3, or 4 mutations, e.g., substitutions, additions, or deletions), a VHCDR2 amino acid sequence of SEQ ID NO: 236 (or a sequence with no more than 1, 2, 3, or 4 mutations, e.g., substitutions, additions, or deletions), and/or a VHCDR3 amino acid sequence of SEQ ID NO: 237 (or a sequence with no more than 1, 2, 3, or 4 mutations, e.g., substitutions, additions, or deletions);
(b) a heavy chain variable region (VH) and/or a light chain variable region (VL), wherein:
(i) the VH comprises a heavy chain complementarity determining region 1 (VHCDR1) amino acid sequence of SEQ ID NO: 57 (or a sequence with no more than 1, 2, 3, or 4 mutations, e.g., substitutions, additions, or deletions), a VHCDR2 amino acid sequence of SEQ ID NO: 58 (or a sequence with no more than 1, 2, 3, or 4 mutations, e.g., substitutions, additions, or deletions), and/or a VHCDR3 amino acid sequence of SEQ ID NO: 59 (or a sequence with no more than 1, 2, 3, or 4 mutations, e.g., substitutions, additions, or deletions), and/or
(ii) the VL comprises a light chain complementarity determining region 1 (VHCDR1) amino acid sequence of SEQ ID NO: 235 (or a sequence with no more than 1, 2, 3, or 4 mutations, e.g., substitutions, additions, or deletions), a VHCDR2 amino acid sequence of SEQ ID NO: 64 (or a sequence with no more than 1, 2, 3, or 4 mutations, e.g., substitutions, additions, or deletions), and/or a VHCDR3 amino acid sequence of SEQ ID NO: 65 (or a sequence with no more than 1, 2, 3, or 4 mutations, e.g., substitutions, additions, or deletions); and/or
(c) a heavy chain variable region (VH) and/or a light chain variable region (VL), wherein:
(i) the VH comprises a heavy chain complementarity determining region 1 (VHCDR1) amino acid sequence of SEQ ID NO: 60 (or a sequence with no more than 1, 2, 3, or 4 mutations, e.g., substitutions, additions, or deletions), a VHCDR2 amino acid sequence of SEQ ID NO: 256 (or a sequence with no more than 1, 2, 3, or 4 mutations, e.g., substitutions, additions, or deletions), and/or a VHCDR3 amino acid sequence of SEQ ID NO: 234 (or a sequence with no more than 1, 2, 3, or 4 mutations, e.g., substitutions, additions, or deletions), and/or
(ii) the VL comprises a light chain complementarity determining region 1 (VHCDR1) amino acid sequence of SEQ ID NO: 66 (or a sequence with no more than 1, 2, 3, or 4 mutations, e.g., substitutions, additions, or deletions), a VHCDR2 amino acid sequence of SEQ ID NO: 67 (or a sequence with no more than 1, 2, 3, or 4 mutations, e.g., substitutions, additions, or deletions), and/or a VHCDR3 amino acid sequence of SEQ ID NO: 68 (or a sequence with no more than 1, 2, 3, or 4 mutations, e.g., substitutions, additions, or deletions).

[0873] In some embodiments, the T cell engager comprises:

(a) a heavy chain variable region (VH) and/or a light chain variable region (VL), wherein:
(i) the VH comprises the amino acid sequence of SEQ ID NO: 15 (or an amino acid sequence having at least about 77%, 80%, 85%, 90%, 95%, or 99% sequence identity thereto), and/or
(ii) the VL comprises the amino acid sequence of SEQ ID NO: 16 (or an amino acid sequence having at least about 77%, 80%, 85%, 90%, 95%, or 99% sequence identity thereto); and/or
(b) a heavy chain variable region (VH) and/or a light chain variable region (VL), wherein:
(i) the VH comprises:
the amino acid sequence of SEQ ID NO: 308 (or an amino acid sequence having at least about 77%, 80%, 85%, 90%, 95%, or 99% sequence identity thereto),
the amino acid sequence of SEQ ID NO: 3438 (or an amino acid sequence having at least about 77%, 80%, 85%, 90%, 95%, or 99% sequence identity thereto), or
the amino acid sequence of SEQ ID NO: 309 (or an amino acid sequence having at least about 77%, 80%, 85%, 90%, 95%, or 99% sequence identity thereto); and/or
(ii) the VL comprises:
the amino acid sequence of SEQ ID NO: 238 (or an amino acid sequence having at least about 77%, 80%, 85%, 90%, 95%, or 99% sequence identity thereto),
the amino acid sequence of SEQ ID NO: 239 (or an amino acid sequence having at least about 77%, 80%, 85%, 90%, 95%, or 99% sequence identity thereto),
the amino acid sequence of SEQ ID NO: 240 (or an amino acid sequence having at least about 77%, 80%, 85%, 90%, 95%, or 99% sequence identity thereto),
the amino acid sequence of SEQ ID NO: 241 (or an amino acid sequence having at least about 77%, 80%, 85%, 90%, 95%, or 99% sequence identity thereto), or
the amino acid sequence of SEQ ID NO: 242 (or an amino acid sequence having at least about 77%, 80%, 85%, 90%, 95%, or 99% sequence identity thereto).

[0874] In some embodiments, the immune cell engager is an NK cell engager, e.g., an NK cell engager that mediates binding to and activation of an NK cell, or an NK cell engager that mediates binding to but not activation of an NK cell.

[0875] In some embodiments, the NK cell engager binds to (e.g., activates): NKp30, NKp40, NKp44, NKp46, NKG2D, DNAM1, DAP10, CD16 (e.g., CD16a, CD16b, or both), CRTAM, CD27, PSGL1, CD96, CD100 (SEMA4D), NKp80, CD244 (also known as SLAMF4 or 2B4), SLAMF6, SLAMF7, KIR2DS2, KIR2DS4, KIR3DS1, KIR2DS3, KIR2DS5, KIR2DS1, CD94, NKG2C, NKG2E, or CD160, e.g., the NK cell engager binds to (e.g., activates) NKp30.

[0876] In some embodiments, the NK cell engager binds to NKp30.

[0877] In some embodiments, the NK cell engager comprises an anti-NKp30 antibody molecule, e.g., as described herein, e.g., comprising one or more amino acid sequences listed in Tables 6, 7, 8, 8A, 8B, 9, 10, and 18, or a sequence with at least 80%, 85%, 90%, 92%, 95%, 97%, 98%, or 99% identity thereto, e.g., wherein the NK cell engager comprises:

(i) one, two, or three heavy chain complementarity determining regions (HC CDRs) and/or one, two, or three light chain complementarity determining regions (LC CDRs) of an anti-NKp30 antigen binding domain disclosed in Tables 6, 7, 8, 8A, 8B, 9, 10, and 18 (e.g., one, two, or three HC CDRs and/or one, two, or three LC CDRs of an anti-NKp30 antigen binding domain disclosed in SEQ ID NO: 6121-6153, 6187-6190, 275, 275, 275, 278, 281, 282, or 283);
(ii) a heavy chain variable region (VH) and/or a light chain variable region (VL) of an anti-NKp30 antigen binding domain disclosed in Tables 6, 7, 8, 8A, 8B, 9, 10, and 18 (e.g., a VH and/or a VL of an anti-NKp30 antigen binding domain disclosed in SEQ ID NO: 6121-6153, 6187-6190, 275, 275, 275, 278, 281, 282, or 283), or a sequence with at least 80%, 85%, 90%, 92%, 95%, 97%, 98%, or 99% identity thereto; or
(iii) an anti-NKp30 antigen binding domain disclosed in Tables 6, 7, 8, 8A, 8B, 9, 10, and 18 (e.g., an anti-NKp30 antigen binding domain disclosed in SEQ ID NO: 6121-6153, 6187-6190, 275, 275, 275, 278, 281, 282, or 283), or a sequence with at least 80%, 85%, 90%, 92%, 95%, 97%, 98%, or 99% identity thereto, optionally wherein the NK cell engager comprises:
(a) an anti-NKp30 antigen binding domain comprising a VH CDR1, VH CDR2, VH CDR3, VL CDR1, VL CDR2, and VL CDR3 comprising the amino acid sequences of SEQ ID NOs: 284, 6001, 7315, 7326, 7327, and 7329, respectively;
(b) an anti-NKp30 antigen binding domain comprising a VH comprising the amino acid sequence of SEQ ID NO: 7302 (or a sequence with at least 80%, 85%, 90%, 92%, 95%, 97%, 98%, or 99% identity thereto) and/or a VL comprising the amino acid sequence of SEQ ID NO: 7309 (or a sequence with at least 80%, 85%, 90%, 92%, 95%, 97%, 98%, or 99% identity thereto); and/or
(c) an anti-NKp30 antigen binding domain comprising the amino acid sequence of SEQ ID NO: 7311 (or a sequence with at least 80%, 85%, 90%, 92%, 95%, 97%, 98%, or 99% identity thereto).

[0878] In some embodiments, the multifunctional molecule comprises a cytokine molecule, e.g., an IL-2 molecule, e.g., as described herein.

[0879] In some embodiments, the cytokine molecule is an IL-2 molecule comprising an IL-2 sequence disclosed in Tables 5 and 6, or a sequence with at least 80%, 85%, 90%, 92%, 95%, 97%, 98%, or 99% identity thereto, optionally wherein the IL-2 molecule comprises a F42A substitution and/or a Y45A substitution.

[0880] In some embodiments, the multifunctional molecule as provided herein comprises:

(i) one antigen binding domain that binds to CD33 and one immune cell engager (e.g., one antigen binding domain that binds to TCRvβ or NKp30);
(ii) one antigen binding domain that binds to CD33 and two immune cell engagers (e.g., two antigen binding domains that bind to TCRvβ or NKp30);
(iii) two antigen binding domains that bind to CD33 and one immune cell engager (e.g., one antigen binding domain that binds to TCRvβ or NKp30); or
(iv) two antigen binding domains that bind to CD33 and two immune cell engagers (e.g., two antigen binding domains that bind to TCRvβ or NKp30), optionally wherein: the multifunctional molecule further comprises one or two cytokine molecules (e.g., one or two IL-2 molecules).

[0881] In some embodiments,

(i) the antigen binding domain that binds to CD33 comprises a Fab region comprising a VH and a VL; and
(ii) the antigen binding domain that binds to TCRvβ or NKp30 comprises a scFv region, e.g., a scFv region that is linked to the VH or VL of the antigen binding domain that binds to CD33, e.g., a scFv region that is linked to the VH (e.g., the N-terminus of the VH) of the antigen binding domain that binds to CD33.

[0882] In some embodiments, the multifunctional molecule as provided herein comprises a first chain comprising a VH of the antigen binding domain that binds to CD33 fused to a heavy chain constant region (e.g., CH1, CH2, and CH3), a second chain comprising a VL of the antigen binding domain that binds to CD33 fused to a light chain constant region, and a third chain comprising the antigen binding domain that binds to TCRvβ or NKp30 (e.g., a scFv region that binds to TCRvβ or NKp30) fused to a heavy chain constant region (e.g., CH2 and CH3), optionally wherein:

(i) the first chain further comprises an IL-2 molecule, e.g., at the C-terminus of the heavy chain constant region (e.g., CH3);
(ii) the second chain further comprises an IL-2 molecule, e.g., at the C-terminus of the light chain constant region;
(iii) the third chain further comprises an IL-2 molecule, e.g., at the N-terminus of the antigen binding domain that binds to TCRvβ or NKp30 (e.g., the scFv that binds to TCRvβ or NKp30);
(iv) the third chain further comprises an IL-2 molecule, e.g., between the antigen binding domain that binds to TCRvβ or NKp30 (e.g., a scFv region that binds to TCRvβ or NKp30) and the heavy chain constant region (e.g., CH2); and/or
(v) the third chain further comprises an IL-2 molecule, e.g., at the C-terminus of the heavy chain constant region (e.g., CH3).

[0883] In some embodiments, the multifunctional molecule as provided herein comprises an antigen binding domain that binds to CD33 and an antigen binding domain that binds to TCRvβ, optionally wherein the multifunctional molecule comprises an amino acid sequence disclosed in Table 5, or a sequence with at least 80%, 85%, 90%, 92%, 95%, 97%, 98%, or 99% identity thereto, optionally wherein the multifunctional molecule comprises:

(i) SEQ ID NO: 267 (or a sequence with at least 80%, 85%, 90%, 92%, 95%, 97%, 98%, or 99% identity thereto) and/or SEQ ID NO: 268 (or a sequence with at least 80%, 85%, 90%, 92%, 95%, 97%, 98%, or 99% identity thereto);
(ii) SEQ ID NO: 269 (or a sequence with at least 80%, 85%, 90%, 92%, 95%, 97%, 98%, or 99% identity thereto) and/or SEQ ID NO: 268 (or a sequence with at least 80%, 85%, 90%, 92%, 95%, 97%, 98%, or 99% identity thereto);
(iii) SEQ ID NO: 270 (or a sequence with at least 80%, 85%, 90%, 92%, 95%, 97%, 98%, or 99% identity thereto) and/or SEQ ID NO: 268 (or a sequence with at least 80%, 85%, 90%, 92%, 95%, 97%, 98%, or 99% identity thereto);
(iv) SEQ ID NO: 271 (or a sequence with at least 80%, 85%, 90%, 92%, 95%, 97%, 98%, or 99% identity thereto) and/or SEQ ID NO: 268 (or a sequence with at least 80%, 85%, 90%, 92%, 95%, 97%, 98%, or 99% identity thereto); or
(v) SEQ ID NO: 272 (or a sequence with at least 80%, 85%, 90%, 92%, 95%, 97%, 98%, or 99% identity thereto) and/or SEQ ID NO: 268 (or a sequence with at least 80%, 85%, 90%, 92%, 95%, 97%, 98%, or 99% identity thereto).

[0884] In some embodiments, the multifunctional molecule as provided herein comprises an antigen binding domain that binds to CD33, an antigen binding domain that binds to TCRvβ, and an IL-2 molecule, optionally wherein the multifunctional molecule comprises an amino acid sequence disclosed in Table 5, or a sequence with at least 80%, 85%, 90%, 92%, 95%, 97%, 98%, or 99% identity thereto, optionally wherein the multifunctional molecule comprises SEQ ID NO: 271 (or a sequence with at least 80%, 85%, 90%, 92%, 95%, 97%, 98%, or 99% identity thereto) and/or SEQ ID NO: 273 (or a sequence with at least 80%, 85%, 90%, 92%, 95%, 97%, 98%, or 99% identity thereto).

[0885] In some embodiments, the multifunctional molecule as provided herein comprises an antigen binding domain that binds to CD33 and an antigen binding domain that binds to NKp30, optionally wherein the multifunctional molecule comprises an amino acid sequence disclosed in Table 6, or a sequence with at least 80%, 85%, 90%, 92%, 95%, 97%, 98%, or 99% identity thereto, optionally wherein the multifunctional molecule comprises:

(i) SEQ ID NO: 274 (or a sequence with at least 80%, 85%, 90%, 92%, 95%, 97%, 98%, or 99% identity thereto), SEQ ID NO: 268 (or a sequence with at least 80%, 85%, 90%, 92%, 95%, 97%, 98%, or 99% identity thereto), and/or SEQ ID NO: 275 (or a sequence with at least 80%, 85%, 90%, 92%, 95%, 97%, 98%, or 99% identity thereto); or
(ii) SEQ ID NO: 277 (or a sequence with at least 80%, 85%, 90%, 92%, 95%, 97%, 98%, or 99% identity thereto), SEQ ID NO: 268 (or a sequence with at least 80%, 85%, 90%, 92%, 95%, 97%, 98%, or 99% identity thereto), and/or SEQ ID NO: 278 (or a sequence with at least 80%, 85%, 90%, 92%, 95%, 97%, 98%, or 99% identity thereto).

[0886] In some embodiments, the multifunctional molecule as provided herein comprises an antigen binding domain that binds to CD33, an antigen binding domain that binds to NKp30, and an IL-2 molecule, optionally wherein the multifunctional molecule comprises an amino acid sequence disclosed in Table 6, or a sequence with at least 80%, 85%, 90%, 92%, 95%, 97%, 98%, or 99% identity thereto, optionally wherein the multifunctional molecule comprises:

(i) SEQ ID NO: 274 (or a sequence with at least 80%, 85%, 90%, 92%, 95%, 97%, 98%, or 99% identity thereto), SEQ ID NO: 273 (or a sequence with at least 80%, 85%, 90%, 92%, 95%, 97%, 98%, or 99% identity thereto), and/or SEQ ID NO: 275 (or a sequence with at least 80%, 85%, 90%, 92%, 95%, 97%, 98%, or 99% identity thereto);
(ii) SEQ ID NO: 274 (or a sequence with at least 80%, 85%, 90%, 92%, 95%, 97%, 98%, or 99% identity thereto), SEQ ID NO: 276 (or a sequence with at least 80%, 85%, 90%, 92%, 95%, 97%, 98%, or 99% identity thereto), and/or SEQ ID NO: 275 (or a sequence with at least 80%, 85%, 90%, 92%, 95%, 97%, 98%, or 99% identity thereto);
(iii) SEQ ID NO: 279 (or a sequence with at least 80%, 85%, 90%, 92%, 95%, 97%, 98%, or 99% identity thereto), SEQ ID NO: 280 (or a sequence with at least 80%, 85%, 90%, 92%, 95%, 97%, 98%, or 99% identity thereto), and/or SEQ ID NO: 281 (or a sequence with at least 80%, 85%, 90%, 92%, 95%, 97%, 98%, or 99% identity thereto);
(iv) SEQ ID NO: 279 (or a sequence with at least 80%, 85%, 90%, 92%, 95%, 97%, 98%, or 99% identity thereto), SEQ ID NO: 280 (or a sequence with at least 80%, 85%, 90%, 92%, 95%, 97%, 98%, or 99% identity thereto), and/or SEQ ID NO: 282 (or a sequence with at least 80%, 85%, 90%, 92%, 95%, 97%, 98%, or 99% identity thereto); or
(v) SEQ ID NO: 279 (or a sequence with at least 80%, 85%, 90%, 92%, 95%, 97%, 98%, or 99% identity thereto), SEQ ID NO: 280 (or a sequence with at least 80%, 85%, 90%, 92%, 95%, 97%, 98%, or 99% identity thereto), and/or SEQ ID NO: 283 (or a sequence with at least 80%, 85%, 90%, 92%, 95%, 97%, 98%, or 99% identity thereto).

[0887] In some embodiments, the multifunctional molecule as provided herein comprises one or more immunoglobulin chain constant regions (e.g., Fc regions) comprising one or more of: a paired cavity-protuberance (“knob-in-a hole”), an electrostatic interaction, or a strand-exchange.

[0888] In some embodiments, the multifunctional molecule as provided herein comprises one or more immunoglobulin chain constant regions (e.g., Fc regions) comprising an amino acid substitution at a position chosen from one or more of 347, 349, 350, 351, 366, 368, 370, 392, 394, 395, 397, 398, 399, 405, 407, or 409, e.g., of the Fc region of human IgG1, optionally wherein the one or more immunoglobulin chain constant regions (e.g., Fc regions) comprise an amino acid substitution chosen from: T366S, L368A, or Y407V (e.g., corresponding to a cavity or hole), or T366W (e.g., corresponding to a protuberance or knob), or a combination thereof.

[0889] In some embodiments, the multifunctional molecule as provided herein comprises one or more immunoglobulin chain constant regions (e.g., Fc regions) that has reduced effector function (e.g., reduced ADCC, ADCP and/or CDC), reduced binding to one or more Fc receptors, and/or reduced binding to C1q complement, compared to a wildtype immunoglobulin chain constant region (e.g., a wildtype Fc region).

[0890] In some embodiments, the multifunctional molecule as provided herein comprises one or more immunoglobulin chain constant regions (e.g., Fc regions) comprising a modification or mutation disclosed in Table 21A, e.g., an Asn297Ala (N297A) mutation or a Leu234Ala/Leu235Ala (LALA) mutation.

[0891] In some embodiments, the multifunctional molecule as provided herein further comprises a linker, e.g., a linker between one or more of: the antigen binding domain that binds to CD33, the immune cell engager, the cytokine molecule, a heavy chain constant region, and a light chain constant region, optionally wherein the linker is chosen from: a cleavable linker, a non-cleavable linker, a peptide linker, a flexible linker, a rigid linker, a helical linker, or a non-helical linker, optionally wherein the linker is a peptide linker, e.g., a peptide linker comprising Gly and Ser, e.g., a peptide linker comprising an amino acid sequence chosen from SEQ ID NOs: 42-45 or 75-78.

[0892] In some embodiments, the multifunctional molecule as provided herein further comprises a modulator of a cytokine molecule, e.g., a TGF-β inhibitor, e.g., as described herein.

[0893] In some embodiments, the multifunctional molecule as provided herein further comprises a stromal modifying moiety, e.g., as described herein.

[0894] In another aspect, provided herein is a nucleic acid molecule encoding the multifunctional molecule as provided herein.

[0895] In another aspect, provided herein is a vector, e.g., an expression vector, comprising the nucleic acid molecule as provided herein.

[0896] In another aspect, provided herein is a cell comprising the nucleic acid molecule as provided herein or the vector as provided herein.

[0897] In another aspect, provided herein is a method of making, e.g., producing, the multifunctional molecule as provided herein, comprising culturing the cell as provided herein, under suitable conditions, e.g., conditions suitable for gene expression and/or homo- or heterodimerization.

[0898] In another aspect, provided herein is a pharmaceutical composition comprising the multifunctional molecule as provided herein, and a pharmaceutically acceptable carrier, excipient, or stabilizer.

[0899] In another aspect, provided herein is a method of treating a cancer, comprising administering to a subject in need thereof the multifunctional molecule as provided herein, wherein the multifunctional molecule is administered in an amount effective to treat the cancer.

[0900] In some embodiments, the subject has cancer cells that express CD33.

[0901] In some embodiments, the cancer is a hematological cancer.

[0902] In some embodiments, the cancer is a myeloid leukemia chosen from: acute myeloblastic leukemia, acute myelomonocytic leukemia, juvenile myelomonocytic leukemia, chronic myelomonocytic leukemia, acute basophilic leukemia, acute eosinophilic leukemia, chronic eosinophilic leukemia, acute biphenotypic leukaemia, acute megakaryoblastic leukemia, acute erythroid leukemia, acute panmyeloic leukemia, chronic neutrophilic leukemia, myeloid dendritic cell leukemia, accelerated phase chronic myelogenous leukemia, essential thrombocytosis, polycythemia vera, myelodysplastic syndrome, or myeloid sarcoma.

[0903] In some embodiments, the method as provided herein further comprises administering a second therapeutic treatment, e.g., a second therapeutic treatment comprising a therapeutic agent (e.g., a chemotherapeutic agent, a biologic agent, hormonal therapy), radiation, or surgery.

[0904] Unless otherwise defined, all technical and scientific terms used herein have the same meaning as commonly understood by one of ordinary skill in the art to which this invention belongs. Although methods and materials similar or equivalent to those described herein can be used in the practice or testing of the present invention, suitable methods and materials are described below. All publications, patent applications, patents, and other references mentioned herein are incorporated by reference in their entirety. In the case of conflict, the present specification, including definitions, will control. In addition, the materials, methods, and examples are illustrative only and are not intended to be limiting.

[0905] Other features and advantages of the invention will be apparent from the following detailed description and claims.

### INCORPORATION BY REFERENCE

[0906] All publications and patents mentioned herein are hereby incorporated by reference in their entirety as if each individual publication or patent was specifically and individually indicated to be incorporated by reference.

### EQUIVALENTS

[0907] Those skilled in the art will recognize, or be able to ascertain using no more than routine experimentation, many equivalents to the specific embodiments of the invention described herein. Such equivalents are intended to be encompassed by the following claims.

The application's sequence listing, which the Patent Office published only in electronic form, follows.

SEQUENCE LISTING (7385 sequences)

SEQ ID NO: 1 - protein, 119 aa, Artificial Sequence
  Description of Artificial Sequence: Synthetic polypeptide
QVQLQQSGPELVKPGTSVKISCKASGYSFTTYYIHWVKQRPGQGLEWIGWFFPGSGNIKYNEKFKGKATLTADTSSSTAYMQLSSLTSEESAVYFCAGSYYSYDVLDYWGHGTTLTVSS

SEQ ID NO: 2 - protein, 107 aa, Artificial Sequence
  Description of Artificial Sequence: Synthetic polypeptide
DILMTQSQKFMSTSLGDRVSVSCKASQNVGINVVWHQQKPGQSPKALIYSSSHRYSGVPDRFTGSGSGTDFTLTINNVQSEDLAEYFCQQFKSYPLTFGAGTKLELK

SEQ ID NO: 3 - protein, 10 aa, Artificial Sequence
  Description of Artificial Sequence: Synthetic peptide
GYSFTTYYIH

SEQ ID NO: 4 - protein, 17 aa, Artificial Sequence
  Description of Artificial Sequence: Synthetic peptide
WFFPGSGNIKYNEKFKG

SEQ ID NO: 5 - protein, 10 aa, Artificial Sequence
  Description of Artificial Sequence: Synthetic peptide
SYYSYDVLDY

SEQ ID NO: 6 - protein, 11 aa, Artificial Sequence
  Description of Artificial Sequence: Synthetic peptide
KASQNVGINVV

SEQ ID NO: 7 - protein, 7 aa, Artificial Sequence
  Description of Artificial Sequence: Synthetic peptide
SSSHRYS

SEQ ID NO: 8 - protein, 9 aa, Artificial Sequence
  Description of Artificial Sequence: Synthetic peptide
QQFKSYPLT

SEQ ID NO: 9 - protein, 119 aa, Artificial Sequence
  Description of Artificial Sequence: Synthetic polypeptide
QVQLVQSGAEVKKPGSSVKVSCKASGYSFTTYYIHWVRQAPGQGLEWMGWFFPGSGNIKYNEKFKGRVTITADTSTSTAYMELSSLRSEDTAVYYCAGSYYSYDVLDYWGQGTTVTVSS

SEQ ID NO: 10 - protein, 107 aa, Artificial Sequence
  Description of Artificial Sequence: Synthetic polypeptide
DIQMTQSPSFLSASVGDRVTITCKASQNVGINVVWHQQKPGKAPKALIYSSSHRYSGVPSRFSGSGSGTEFTLTISSLQPEDFATYFCQQFKSYPLTFGQGTKLEIK

SEQ ID NO: 11 - protein, 107 aa, Artificial Sequence
  Description of Artificial Sequence: Synthetic polypeptide
DIQMTQSPSSLSASVGDRVTITCKASQNVGINVVWHQQKPGKVPKALIYSSSHRYSGVPSRFSGSGSGTDFTLTISSLQPEDVATYFCQQFKSYPLTFGQGTKLEIK

SEQ ID NO: 12 - DNA, 357 bp, Artificial Sequence
  Description of Artificial Sequence: Synthetic polynucleotide
caggtgcagctggttcagtctggcgccgaagtgaagaaacctggctcctccgtgaaggtgtcctgcaaggcttccggctactccttcaccacctactacatccactgggtccgacaggcccctggacaaggattggaatggatgggctggttcttccccggctccggcaacatcaagtacaacgagaagttcaagggccgcgtgaccatcaccgccgacacctctacctctaccgcctacatggaactgtccagcctgagatctgaggacaccgccgtgtactactgcgccggctcctactactcttacgacgtgctggattactggggccagggcaccacagtgacagtgtcctct

SEQ ID NO: 13 - DNA, 321 bp, Artificial Sequence
  Description of Artificial Sequence: Synthetic polynucleotide
gacatccagatgacccagtctccatccttcctgtccgcctctgtgggcgacagagtgaccatcacatgcaaggcctctcagaacgtgggcatcaacgtcgtgtggcaccagcagaagcctggcaaggctcctaaggctctgatctactcctccagccaccggtactctggcgtgccctctagattttccggctctggctctggcaccgagtttaccctgacaatctccagcctgcagcctgaggacttcgccacctacttttgccagcagttcaagagctaccctctgacctttggccagggcaccaagctggaaatcaag

SEQ ID NO: 14 - DNA, 321 bp, Artificial Sequence
  Description of Artificial Sequence: Synthetic polynucleotide
gacatccagatgacccagtctccatcctctctgtccgcctctgtgggcgacagagtgaccatcacatgcaaggcctctcagaacgtgggcatcaacgtcgtgtggcaccagcagaaacctggcaaggtgcccaaggctctgatctactcctccagccacagatactccggcgtgccctctagattctccggctctggctctggcaccgactttaccctgacaatctccagcctgcagcctgaggacgtggccacctacttttgccagcagttcaagagctaccctctgacctttggccagggcaccaagctggaaatcaag

SEQ ID NO: 15 - protein, 117 aa, Artificial Sequence
  Description of Artificial Sequence: Synthetic polypeptide
DVQLVESGGGLVQPGGSRKLSCAASGFTFSNFGMHWVRQAPDKGLEWVAYISSGSSTIYYADTLKGRFTISRDNPKNTLFLQMTSLRSEDTAMYYCARRGEGAMDYWGQGTSVTVSS

SEQ ID NO: 16 - protein, 106 aa, Artificial Sequence
  Description of Artificial Sequence: Synthetic polypeptide
ENVLTQSPAIMSASLGEKVTMSCRASSSVNYIYWYQQKSDASPKLWIYYTSNLAPGVPTRFSGSGSGNSYSLTISSMEGEDAATYYCQQFTSSPFTFGSGTKLEIK

SEQ ID NO: 17 - protein, 114 aa, Homo sapiens
NWVNVISDLKKIEDLIQSMHIDATLYTESDVHPSCKVTAMKCFLLELQVISLESGDASIHDTVENLIILANNSLSSNGNVTESGCKECEELEEKNIKEFLQSFVHIVQMFINTS

SEQ ID NO: 18 - protein, 77 aa, Unknown
  Description of Unknown: IL15Ralpha sequence
MAPRRARGCRTLGLPALLLLLLLRPPATRGITCPPPMSVEHADIWVKSYSLYSRERYICNSGFKRKAGTSSLTECVL

SEQ ID NO: 19 - protein, 20 aa, Artificial Sequence
  Description of Artificial Sequence: Synthetic peptide
SGGSGGGGSGGGSGGGGSLQ

SEQ ID NO: 20 - protein, 133 aa, Homo sapiens [sequence omitted]

SEQ ID NO: 21 - protein, 157 aa, Homo sapiens
YFGKLESKLSVIRNLNDQVLFIDQGNRPLFEDMTDSDCRDNAPRTIFIISMYKDSQPRGMAVTISVKCEKISTLSCENKIISFKEMNPPDNIKDTKSDIIFFQRSVPGHDNKMQFESSSYEGYFLACEKERDLFKLILKKEDELGDRSIMFTVQNED

SEQ ID NO: 22 - protein, 133 aa, Homo sapiens [sequence omitted]

SEQ ID NO: 23 - protein, 138 aa, Homo sapiens
QDPYVKEAENLKKYFNAGHSDVADNGTLFLGILKNWKEESDRKIMQSQIVSFYFKLFKNFKDDQSIQKSVETIKEDMNVKFFNSNKKKRDDFEKLTNYSVTDLNVQRKAIHELIQVMAELSPAAKTGKRKRSQMLFRG

SEQ ID NO: 24 - protein, 238 aa, Unknown
  Description of Unknown: B7-6 sequence
DLKVEMMAGGTQITPLNDNVTIFCNIFYSQPLNITSMGITWFWKSLTFDKEVKVFEFFGDHQEAFRPGAIVSPWRLKSGDASLRLPGIQLEEAGEYRCEVVVTPLKAQGTVQLEVVASPASRLLLDQVGMKENEDKYMCESSGFYPEAINITWEKQTQKFPHPIEISEDVITGPTIKNMDGTFNVTSCLKLNSSQEDPGTVYQCVVRHASLHTPLRSNFTLTAARHSLSETEKTDNFS

SEQ ID NO: 25 - protein, 284 aa, Unknown
  Description of Unknown: MICA sequence
EPHSLRYNLTVLSWDGSVQSGFLTEVHLDGQPFLRCDRQKCRAKPQGQWAEDVLGNKTWDRETRDLTGNGKDLRMTLAHIKDQKEGLHSLQEIRVCEIHEDNSTRSSQHFYYDGELFLSQNLETKEWTMPQSSRAQTLAMNVRNFLKEDAMKTKTHYHAMHADCLQELRRYLKSGVVLRRTVPPMVNVTRSEASEGNITVTCRASGFYPWNITLSWRQDGVSLSHDTQQWGDVLPDGNGTYQTWVATRICQGEEQRFTCYMEHSGNHSTHPVPSGKVLVLQSHW

SEQ ID NO: 26 - protein, 287 aa, Unknown
  Description of Unknown: MICB sequence
AEPHSLRYNLMVLSQDESVQSGFLAEGHLDGQPFLRYDRQKRRAKPQGQWAEDVLGAKTWDTETEDLTENGQDLRRTLTHIKDQKGGLHSLQEIRVCEIHEDSSTRGSRHFYYDGELFLSQNLETQESTVPQSSRAQTLAMNVTNFWKEDAMKTKTHYRAMQADCLQKLQRYLKSGVAIRRTVPPMVNVTCSEVSEGNITVTCRASSFYPRNITLTWRQDGVSLSHNTQQWGDVLPDGNGTYQTWVATRIRQGEEQRFTCYMEHSGNHGTHPVPSGKVLVLQSQRTD

SEQ ID NO: 27 - protein, 191 aa, Unknown
  Description of Unknown: ULBP1 sequence
GWVDTHCLCYDFIITPKSRPEPQWCEVQGLVDERPFLHYDCVNHKAKAFASLGKKVNVTKTWEEQTETLRDVVDFLKGQLLDIQVENLIPIEPLTLQARMSCEHEAHGHGRGSWQFLFNGQKFLLFDSNNRKWTALHPGAKKMTEKWEKNRDVTMFFQKISLGDCKMWLEEFLMYWEQMLDPTKPPSLAPG

SEQ ID NO: 28 - protein, 329 aa, Unknown
  Description of Unknown: NECTIN2 sequence
QDVRVQVLPEVRGQLGGTVELPCHLLPPVPGLYISLVTWQRPDAPANHQNVAAFHPKMGPSFPSPKPGSERLSFVSAKQSTGQDTEAELQDATLALHGLTVEDEGNYTCEFATFPKGSVRGMTWLRVIAKPKNQAEAQKVTFSQDPTTVALCISKEGRPPARISWLSSLDWEAKETQVSGTLAGTVTVTSRFTLVPSGRADGVTVTCKVEHESFEEPALIPVTLSVRYPPEVSISGYDDNWYLGRTDATLSCDVRSNPEPTGYDWSTTSGTFPTSAVAQGSQLVIHAVDSLFNTTFVCTVTNAVGMGRAEQVIFVRETPNTAGAGATGG

SEQ ID NO: 29 - protein, 323 aa, Unknown
  Description of Unknown: NECL5 sequence
WPPPGTGDVVVQAPTQVPGFLGDSVTLPCYLQVPNMEVTHVSQLTWARHGESGSMAVFHQTQGPSYSESKRLEFVAARLGAELRNASLRMFGLRVEDEGNYTCLFVTFPQGSRSVDIWLRVLAKPQNTAEVQKVQLTGEPVPMARCVSTGGRPPAQITWHSDLGGMPNTSQVPGFLSGTVTVTSLWILVPSSQVDGKNVTCKVEHESFEKPQLLTVNLTVYYPPEVSISGYDNNWYLGQNEATLTCDARSNPEPTGYNWSTTMGPLPPFAVAQGAQLLIRPVDKPINTTLICNVTNALGARQAELTVQVKEGPPSEHSGISRN

SEQ ID NO: 30 - protein, 330 aa, Unknown
  Description of Unknown: NECL2 sequence
QNLFTKDVTVIEGEVATISCQVNKSDDSVIQLLNPNRQTIYFRDFRPLKDSRFQLLNFSSSELKVSLTNVSISDEGRYFCQLYTDPPQESYTTITVLVPPRNLMIDIQKDTAVEGEEIEVNCTAMASKPATTIRWFKGNTELKGKSEVEEWSDMYTVTSQLMLKVHKEDDGVPVICQVEHPAVTGNLQTQRYLEVQYKPQVHIQMTYPLQGLTREGDALELTCEAIGKPQPVMVTWVRVDDEMPQHAVLSGPNLFINNLNKTDNGTYRCEASNIVGKAHSDYMLYVYDPPTTIPPPTTTTTTTTTTTTTILTIITDSRAGEEGSIRAVDH

SEQ ID NO: 31 - protein, 155 aa, Unknown
  Description of Unknown: CD70 sequence
QRFAQAQQQLPLESLGWDVAELQLNHTGPQQDPRLYWQGGPALGRSFLHGPELDKGQLRIHRDGIYMVHIQVTLAICSSTTASRHHPTTLAVGICSPASRSISLLRLSFHQGCTIASQRLTPLARGDTLCTNLTGTLLPSRNTDETFFGVQWVRP

SEQ ID NO: 32 - protein, 294 aa, Unknown
  Description of Unknown: L-selectin sequence
WTYHYSEKPMNWQRARRFCRDNYTDLVAIQNKAEIEYLEKTLPFSRSYYWIGIRKIGGIWTWVGTNKSLTEEAENWGDGEPNNKKNKEDCVEIYIKRNKDAGKWNDDACHKLKAALCYTASCQPWSCSGHGECVEIINNYTCNCDVGYYGPQCQFVIQCEPLEAPELGTMDCTHPLGNFSFSSQCAFSCSEGTNLTGIEETTCGPFGNWSSPEPTCQVIQCEPLSAPDLGIMNCSHPLASFSFTSACTFICSEGTELIGKKKTICESSGIWSNPSPICQKLDKSFSMIKEGDYN

SEQ ID NO: 33 - protein, 243 aa, Unknown
  Description of Unknown: CD72 sequence
RYLQVSQQLQQTNRVLEVTNSSLRQQLRLKITQLGQSAEDLQGSRRELAQSQEALQVEQRAHQAAEGQLQACQADRQKTKETLQSEEQQRRALEQKLSNMENRLKPFFTCGSADTCCPSGWIMHQKSCFYISLTSKNWQESQKQCETLSSKLATFSEIYPQSHSYYFLNSLLPNGGSGNSYWTGLSSNKDWKLTDDTQRTRTYAQSSKCNKVHKTWSWWTLESESCRSSLPYICEMTAFRFPD

SEQ ID NO: 34 - protein, 124 aa, Unknown
  Description of Unknown: CLEC2B (AICL) sequence
KLTRDSQSLCPYDWIGFQNKCYYFSKEEGDWNSSKYNCSTQHADLTIIDNIEEMNFLRRYKCSSDHWIGLKMAKNRTGQWVDGATFTKSFGMRGSEGCAYLSDDGAATARCYTERKWICRKRIH

SEQ ID NO: 35 - protein, 194 aa, Unknown
  Description of Unknown: CD48 sequence
QGHLVHMTVVSGSNVTLNISESLPENYKQLTWFYTFDQKIVEWDSRKSKYFESKFKGRVRLDPQSGALYISKVQKEDNSTYIMRVLKKTGNEQEWKIKLQVLDPVPKPVIKIEKIEDMDDNCYLKLSCVIPGESVNYTWYGDKRPFPKELQNSVLETTLMPHNYSRCYTCQVSNSVSSKNGTVCLSPPCTLARS

SEQ ID NO: 36 - protein, 133 aa, Unknown
  Description of Unknown: OX40L sequence
QVSHRYPRIQSIKVQFTEYKKEKGFILTSQKEDEIMKVQNNSVIINCDGFYLISLKGYFSQEVNISLHYQKDEEPLFQLKKVRSVNSLMVASLTYKDKVYLNVTTDNTSLDDFHVNGGELILIHQNPGEFCVL

SEQ ID NO: 37 - protein, 149 aa, Unknown
  Description of Unknown: CD40L sequence
MQKGDQNPQIAAHVISEASSKTTSVLQWAEKGYYTMSNNLVTLENGKQLTVKRQGLYYIYAQVTFCSNREASSQAPFIASLCLKSPGRFERILLRAANTHSSAKPCGQQSIHLGGVFELQPGASVFVNVTDPSQVSHGTGFTSFGLLKL

SEQ ID NO: 38 - protein, 205 aa, Unknown
  Description of Unknown: 41BB ligand sequence
ACPWAVSGARASPGSAASPRLREGPELSPDDPAGLLDLRQGMFAQLVAQNVLLIDGPLSWYSDPGLAGVSLTGGLSYKEDTKELVVAKAGVYYVFFQLELRRVVAGEGSGSVSLALHLQPLRSAAGAAALALTVDLPPASSEARNSAFGFQGRLLHLSAGQRLGVHLHTEARARHAWQLTQGATVLGLFRVTPEIPAGLPSPRSE

SEQ ID NO: 39 - protein, 455 aa, Artificial Sequence
  Description of Artificial Sequence: Synthetic polypeptide
LNFRAPPVIPNVPFLWAWNAPSEFCLGKFDEPLDMSLFSFIGSPRINATGQGVTIFYVDRLGYYPYIDSITGVTVNGGIPQKISLQDHLDKAKKDITFYMPVDNLGMAVIDWEEWRPTWARNWKPKDVYKNRSIELVQQQNVQLSLTEATEKAKQEFEKAGKDFLVETIKLGKLLRPNHLWGYYLFPDCYNHHYKKPGYNGSCFNVEIKRNDDLSWLWNESTALYPSIYLNTQQSPVAATLYVRNRVREAIRVSKIPDAKSPLPVFAYTRIVFTDQVLKFLSQDELVYTFGETVALGASGIVIWGTLSIMRSMKSCLLLDNYMETILNPYIINVTLAAKMCSQVLCQEQGVCIRKNWNSSDYLHLNPDNFAIQLEKGGKFTVRGKPTLEDLEQFSEKFYCSCYSTLSCKEKADVKDTDAVDVCIADGVCIDAFLKPPMETEEPQIFYNASPSTLS

SEQ ID NO: 40 - protein, 326 aa, Artificial Sequence
  Description of Artificial Sequence: Synthetic polypeptide
ASTKGPSVFPLAPCSRSTSESTAALGCLVKDYFPEPVTVSWNSGALTSGVHTFPAVLQSSGLYSLSSVVTVPSSSLGTKTYTCNVDHKPSNTKVDKRVESKYGPPCPPCPAPEFLGGPSVFLFPPKPKDTLMISRTPEVTCVVVDVSQEDPEVQFNWYVDGVEVHNAKTKPREEQFNSTYRVVSVLTVLHQDWLNGKEYKCKVSNKGLPSSIEKTISKAKGQPREPQVYTLPPSQEEMTKNQVSLTCLVKGFYPSDIAVEWESNGQPENNYKTTPPVLDSDGSFFLYSRLTVDKSRWQEGNVFSCSVMHEALHNHYTQKSLSLSLG

SEQ ID NO: 41 - protein, 330 aa, Homo sapiens
ASTKGPSVFPLAPSSKSTSGGTAALGCLVKDYFPEPVTVSWNSGALTSGVHTFPAVLQSSGLYSLSSVVTVPSSSLGTQTYICNVNHKPSNTKVDKRVEPKSCDKTHTCPPCPAPELLGGPSVFLFPPKPKDTLMISRTPEVTCVVVDVSHEDPEVKFNWYVDGVEVHNAKTKPREEQYNSTYRVVSVLTVLHQDWLNGKEYKCKVSNKALPAPIEKTISKAKGQPREPQVYTLPPSREEMTKNQVSLTCLVKGFYPSDIAVEWESNGQPENNYKTTPPVLDSDGSFFLYSKLTVDKSRWQQGNVFSCSVMHEALHNHYTQKSLSLSPGK

SEQ ID NO: 42 - protein, 5 aa, Artificial Sequence
  Description of Artificial Sequence: Synthetic peptide
GGGGS

SEQ ID NO: 43 - protein, 10 aa, Artificial Sequence
  Description of Artificial Sequence: Synthetic peptide
GGGGSGGGGS

SEQ ID NO: 44 - protein, 15 aa, Artificial Sequence
  Description of Artificial Sequence: Synthetic peptide
GGGGSGGGGSGGGGS

SEQ ID NO: 45 - protein, 17 aa, Artificial Sequence
  Description of Artificial Sequence: Synthetic peptide
DVPSGPGGGGGSGGGGS

SEQ ID NO: 46 - protein, 17 aa, Artificial Sequence
  Description of Artificial Sequence: Synthetic peptide
WFFPGSGNIKYNEKFKG

SEQ ID NO: 47 - protein, 10 aa, Artificial Sequence
  Description of Artificial Sequence: Synthetic peptide
SYYSYDVLDY

SEQ ID NO: 48 - protein, 7 aa, Artificial Sequence
  Description of Artificial Sequence: Synthetic peptide
GYSFTTY

SEQ ID NO: 49 - protein, 6 aa, Artificial Sequence
  Description of Artificial Sequence: Synthetic peptide
FPGSGN

SEQ ID NO: 50 - protein, 10 aa, Artificial Sequence
  Description of Artificial Sequence: Synthetic peptide
SYYSYDVLDY

SEQ ID NO: 51 - protein, 11 aa, Artificial Sequence
  Description of Artificial Sequence: Synthetic peptide
KASQNVGINVV

SEQ ID NO: 52 - protein, 7 aa, Artificial Sequence
  Description of Artificial Sequence: Synthetic peptide
SSSHRYS

SEQ ID NO: 53 - protein, 9 aa, Artificial Sequence
  Description of Artificial Sequence: Synthetic peptide
QQFKSYPLT

SEQ ID NO: 54 - protein, 11 aa, Artificial Sequence
  Description of Artificial Sequence: Synthetic peptide
KASQNVGINVV

SEQ ID NO: 55 - protein, 7 aa, Artificial Sequence
  Description of Artificial Sequence: Synthetic peptide
SSSHRYS

SEQ ID NO: 56 - protein, 9 aa, Artificial Sequence
  Description of Artificial Sequence: Synthetic peptide
QQFKSYPLT

SEQ ID NO: 57 - protein, 5 aa, Artificial Sequence
  Description of Artificial Sequence: Synthetic peptide
NFGMH

SEQ ID NO: 58 - protein, 17 aa, Artificial Sequence
  Description of Artificial Sequence: Synthetic peptide
YISSGSSTIYYADTLKG

SEQ ID NO: 59 - protein, 8 aa, Artificial Sequence
  Description of Artificial Sequence: Synthetic peptide
RGEGAMDY

SEQ ID NO: 60 - protein, 7 aa, Artificial Sequence
  Description of Artificial Sequence: Synthetic peptide
GFTFSNF

SEQ ID NO: 61 - protein, 455 aa, Unknown; identical to SEQ ID NO: 39
  Description of Unknown: hyaluronidase sequence

SEQ ID NO: 62 - protein, 413 aa, Unknown
  Description of Unknown: HYAL1 sequence
FRGPLLPNRPFTTVWNANTQWCLERHGVDVDVSVFDVVANPGQTFRGPDMTIFYSSQGTYPYYTPTGEPVFGGLPQNASLIAHLARTFQDILAAIPAPDFSGLAVIDWEAWRPRWAFNWDTKDIYRQRSRALVQAQHPDWPAPQVEAVAQDQFQGAARAWMAGTLQLGRALRPRGLWGFYGFPDCYNYDFLSPNYTGQCPSGIRAQNDQLGWLWGQSRALYPSIYMPAVLEGTGKSQMYVQHRVAEAFRVAVAAGDPNLPVLPYVQIFYDTTNHFLPLDELEHSLGESAAQGAAGVVLWVSWENTRTKESCQAIKEYMDTTLGPFILNVTSGALLCSQALCSGHGRCVRRTSHPKALLLLNPASFSIQLTPGGGPLSLRGALSLEDQAQMAVEFKCRCYPGWQAPWCERKSMW

SEQ ID NO: 63 - protein, 551 aa, Unknown
  Description of Unknown: collagenase molecule IV sequence
YNFFPRKPKWDKNQITYRIIGYTPDLDPETVDDAFARAFQVWSDVTPLRFSRIHDGEADIMINFGRWEHGDGYPFDGKDGLLAHAFAPGTGVGGDSHFDDDELWTLGEGQVVRVKYGNADGEYCKFPFLFNGKEYNSCTDTGRSDGFLWCSTTYNFEKDGKYGFCPHEALFTMGGNAEGQPCKFPFRFQGTSYDSCTTEGRTDGYRWCGTTEDYDRDKKYGFCPETAMSTVGGNSEGAPCVFPFTFLGNKYESCTSAGRSDGKMWCATTANYDDDRKWGFCPDQGYSLFLVAAHEFGHAMGLEHSQDPGALMAPIYTYTKNFRLSQDDIKGIQELYGASPDIDLGTGPTPTLGPVTPEICKQDIVFDGIAQIRGEIFFFKDRFIWRTVTPRDKPMGPLLVATFWPELPEKIDAVYEAPQEEKAVFFAGNEYWIYSASTLERGYPKPLTSLGLPPDVQRVDAAFNWSKNKKTYIFAGDKFWRYNEVKKKMDPGFPKLIADAWNAIPDNLDAVVDLQGGGHSYFFKGAYYLKLENQSLKSVKFGSIKSDWLGC

SEQ ID NO: 64 - protein, 7 aa, Artificial Sequence
  Description of Artificial Sequence: Synthetic peptide
YTSNLAP

SEQ ID NO: 65 - protein, 9 aa, Artificial Sequence
  Description of Artificial Sequence: Synthetic peptide
QQFTSSPFT

SEQ ID NO: 66 - protein, 10 aa, Artificial Sequence
  Description of Artificial Sequence: Synthetic peptide
RASSSVNYIY

SEQ ID NO: 67 - protein, 7 aa, Artificial Sequence
  Description of Artificial Sequence: Synthetic peptide
YTSNLAP

SEQ ID NO: 68 - protein, 9 aa, Artificial Sequence
  Description of Artificial Sequence: Synthetic peptide
QQFTSSPFT

SEQ ID NO: 69 - protein, 592 aa, Artificial Sequence
  Description of Artificial Sequence: Synthetic polypeptide
METDTLLLWVLLLWVPGSTGQVQLVQSGAEVKKPGSSVKVSCKASGYSFTTYYIHWVRQAPGQGLEWMGWFFPGSGNIKYNEKFKGRVTITADTSTSTAYMELSSLRSEDTAVYYCAGSYYSYDVLDYWGQGTTVTVSSGSASAPTLFPLVSCENSPSDTSSVAVGCLAQDFLPDSITFSWKYKNNSDISSTRGFPSVLRGGKYAATSQVLLPSKDVMQGTDEHVVCKVQHPNGNKEKNVPLPVIAELPPKVSVFVPPRDGFFGNPRKSKLICQATGFSPRQIQVSWLREGKQVGSGVTTDQVQAEAKESGPTTYKVTSTLTIKESDWLGQSMFTCRVDHRGLTFQQNASSMCVPDQDTAIRVFAIPPSFASIFLTKSTKLTCLVTDLTTYDSVTISWTRQNGEAVKTHTNISESHPNATFSAVGEASICEDDWNSGERFTCTVTHTDLASSLKQTISRPKGVALHRPDVYLLPPAREQLNLRESATITCLVTGFSPADVFVQWMQRGQPLSPEKYVTSAPMPEPQAPGRYFAHSILTVSEEEWNTGETYTCVVAHEALPNRVTERTVDKSTGKPTLYNVSLVMSDTAGTCY

SEQ ID NO: 70 - protein, 492 aa, Artificial Sequence
  Description of Artificial Sequence: Synthetic polypeptide
METDTLLLWVLLLWVPGSTGQVQLVQSGAEVKKPGSSVKVSCKASGYSFTTYYIHWVRQAPGQGLEWMGWFFPGSGNIKYNEKFKGRVTITADTSTSTAYMELSSLRSEDTAVYYCAGSYYSYDVLDYWGQGTTVTVSSASPTSPKVFPLSLCSTQPDGNVVIACLVQGFFPQEPLSVTWSESGQGVTARNFPPSQDASGDLYTTSSQLTLPATQCLAGKSVTCHVKHYTNPSQDVTVPCPVPSTPPTPSPSTPPTPSPSCCHPRLSLHRPALEDLLLGSEANLTCTLTGLRDASGVTFTWTPSSGKSAVQGPPERDLCGCYSVSSVLPGCAEPWNHGKTFTCTAAYPESKTPLTATLSKSGNTFRPEVHLLPPPSEELALNELVTLTCLARGFSPKDVLVRWLQGSQELPREKYLTWASRQEPSQGTTTFAVTSILRVAAEDWKKGDTFSCMVGHEALPLAFTQKTIDRLAGKPTHVNVSVVMAEVDGTCY

SEQ ID NO: 71 - protein, 479 aa, Artificial Sequence
  Description of Artificial Sequence: Synthetic polypeptide
METDTLLLWVLLLWVPGSTGQVQLVQSGAEVKKPGSSVKVSCKASGYSFTTYYIHWVRQAPGQGLEWMGWFFPGSGNIKYNEKFKGRVTITADTSTSTAYMELSSLRSEDTAVYYCAGSYYSYDVLDYWGQGTTVTVSSASPTSPKVFPLSLDSTPQDGNVVVACLVQGFFPQEPLSVTWSESGQNVTARNFPPSQDASGDLYTTSSQLTLPATQCPDGKSVTCHVKHYTNSSQDVTVPCRVPPPPPCCHPRLSLHRPALEDLLLGSEANLTCTLTGLRDASGATFTWTPSSGKSAVQGPPERDLCGCYSVSSVLPGCAQPWNHGETFTCTAAHPELKTPLTANITKSGNTFRPEVHLLPPPSEELALNELVTLTCLARGFSPKDVLVRWLQGSQELPREKYLTWASRQEPSQGTTTYAVTSILRVAAEDWKKGETFSCMVGHEALPLAFTQKTIDRMAGKPTHINVSVVMAEADGTCY

SEQ ID NO: 72 - protein, 234 aa, Artificial Sequence
  Description of Artificial Sequence: Synthetic polypeptide
METDTLLLWVLLLWVPGSTGDIQMTQSPSFLSASVGDRVTITCKASQNVGINVVWHQQKPGKAPKALIYSSSHRYSGVPSRFSGSGSGTEFTLTISSLQPEDFATYFCQQFKSYPLTFGQGTKLEIKRTVAAPSVFIFPPSDEQLKSGTASVVCLLNNFYPREAKVQWKVDNALQSGNSQESVTEQDSKDSTYSLSSTLTLSKADYEKHKVYACEVTHQGLSSPVTKSFNRGEC

SEQ ID NO: 73 - protein, 453 aa, Artificial Sequence
  Description of Artificial Sequence: Synthetic polypeptide
GSASAPTLFPLVSCENSPSDTSSVAVGCLAQDFLPDSITFSWKYKNNSDISSTRGFPSVLRGGKYAATSQVLLPSKDVMQGTDEHVVCKVQHPNGNKEKNVPLPVIAELPPKVSVFVPPRDGFFGNPRKSKLICQATGFSPRQIQVSWLREGKQVGSGVTTDQVQAEAKESGPTTYKVTSTLTIKESDWLGQSMFTCRVDHRGLTFQQNASSMCVPDQDTAIRVFAIPPSFASIFLTKSTKLTCLVTDLTTYDSVTISWTRQNGEAVKTHTNISESHPNATFSAVGEASICEDDWNSGERFTCTVTHTDLASSLKQTISRPKGVALHRPDVYLLPPAREQLNLRESATITCLVTGFSPADVFVQWMQRGQPLSPEKYVTSAPMPEPQAPGRYFAHSILTVSEEEWNTGETYTCVVAHEALPNRVTERTVDKSTGKPTLYNVSLVMSDTAGTCY

SEQ ID NO: 74 - protein, 353 aa, Homo sapiens
ASPTSPKVFPLSLCSTQPDGNVVIACLVQGFFPQEPLSVTWSESGQGVTARNFPPSQDASGDLYTTSSQLTLPATQCLAGKSVTCHVKHYTNPSQDVTVPCPVPSTPPTPSPSTPPTPSPSCCHPRLSLHRPALEDLLLGSEANLTCTLTGLRDASGVTFTWTPSSGKSAVQGPPERDLCGCYSVSSVLPGCAEPWNHGKTFTCTAAYPESKTPLTATLSKSGNTFRPEVHLLPPPSEELALNELVTLTCLARGFSPKDVLVRWLQGSQELPREKYLTWASRQEPSQGTTTFAVTSILRVAAEDWKKGDTFSCMVGHEALPLAFTQKTIDRLAGKPTHVNVSVVMAEVDGTCY

SEQ ID NO: 75 - protein, 14 aa, Artificial Sequence
  Description of Artificial Sequence: Synthetic peptide
AEAAAKEAAAKAAA

SEQ ID NO: 76 - protein, 19 aa, Artificial Sequence
  Description of Artificial Sequence: Synthetic peptide
AEAAAKEAAAKEAAAKAAA

SEQ ID NO: 77 - protein, 24 aa, Artificial Sequence
  Description of Artificial Sequence: Synthetic peptide
AEAAAKEAAAKEAAAKEAAAKAAA

SEQ ID NO: 78 - protein, 29 aa, Artificial Sequence
  Description of Artificial Sequence: Synthetic peptide
AEAAAKEAAAKEAAAKEAAAKEAAAKAAA

SEQ ID NO: 79 - skipped

SEQ ID NO: 80 - protein, 246 aa, Artificial Sequence
  Description of Artificial Sequence: Synthetic polypeptide
QVQLVQSGAEVKKPGSSVKVSCKASGTDFKLTYIHWVRQAPGQGLEWMGRVSPGSGNTKYNEKFKGRVTITADTSTSTAYMELSSLRSEDTAVYYCAGSYYSYDVLDYWGQGTTVTVSSGGGGSGGGGSGGGGSGGGGSDIQMTQSPSFLSASVGDRVTITCKASQNVEDRVAWYQQKPGKAPKALIYSSSHRYKGVPSRFSGSGSGTEFTLTISSLQPEDFATYFCQQFKSYPLTFGQGTKLEIK

SEQ ID NO: 81 - protein, 107 aa, Artificial Sequence
  Description of Artificial Sequence: Synthetic polypeptide
DIQMTQSPSFLSASVGDRVTITCKASQNVEDRVAWYQQKPGKAPKALIYSSSHRYKGVPSRFSGSGSGTEFTLTISSLQPEDFATYFCQQFKSYPLTFGQGTKLEIK

SEQ ID NO: 82 - protein, 119 aa, Artificial Sequence
  Description of Artificial Sequence: Synthetic polypeptide
QVQLVQSGAEVKKPGSSVKVSCKASGTDFKLTYIHWVRQAPGQGLEWMGRVSPGSGNTKYNEKFKGRVTITADTSTSTAYMELSSLRSEDTAVYYCAGSYYSYDVLDYWGQGTTVTVSS

SEQ ID NO: 83 - protein, 246 aa, Artificial Sequence
  Description of Artificial Sequence: Synthetic polypeptide
QVQLVQSGAEVKKPGSSVKVSCKASGTDFDKIYIHWVRQAPGQGLEWMGRISAGSGNVKYNEKFKGRVTITADTSTSTAYMELSSLRSEDTAVYYCAGSYYSYDVLDYWGQGTTVTVSSGGGGSGGGGSGGGGSGGGGSDIQMTQSPSFLSASVGDRVTITCKASQNVEDRVAWYQQKPGKAPKALIYSSSHRYKGVPSRFSGSGSGTEFTLTISSLQPEDFATYFCQQFKSYPLTFGQGTKLEIK

SEQ ID NO: 84 - protein, 107 aa, Artificial Sequence; identical to SEQ ID NO: 81
  Description of Artificial Sequence: Synthetic polypeptide

SEQ ID NO: 85 - protein, 119 aa, Artificial Sequence
  Description of Artificial Sequence: Synthetic polypeptide
QVQLVQSGAEVKKPGSSVKVSCKASGTDFDKIYIHWVRQAPGQGLEWMGRISAGSGNVKYNEKFKGRVTITADTSTSTAYMELSSLRSEDTAVYYCAGSYYSYDVLDYWGQGTTVTVSS

SEQ ID NO: 86 - protein, 246 aa, Artificial Sequence
  Description of Artificial Sequence: Synthetic polypeptide
QVQLVQSGAEVKKPGSSVKVSCKASGHDFRDFYIHWVRQAPGQGLEWMGRVYPGSGSYRYNEKFKGRVTITADTSTSTAYMELSSLRSEDTAVYYCAGSYYSYDVLDYWGQGTTVTVSSGGGGSGGGGSGGGGSGGGGSDIQMTQSPSFLSASVGDRVTITCKASQNVDDRVAWYQQKPGKAPKALIYSSSHRYKGVPSRFSGSGSGTEFTLTISSLQPEDFATYFCQQFKSYPLTFGQGTKLEIK

SEQ ID NO: 87 - protein, 107 aa, Artificial Sequence
  Description of Artificial Sequence: Synthetic polypeptide
DIQMTQSPSFLSASVGDRVTITCKASQNVDDRVAWYQQKPGKAPKALIYSSSHRYKGVPSRFSGSGSGTEFTLTISSLQPEDFATYFCQQFKSYPLTFGQGTKLEIK

SEQ ID NO: 88 - protein, 119 aa, Artificial Sequence
  Description of Artificial Sequence: Synthetic polypeptide
QVQLVQSGAEVKKPGSSVKVSCKASGHDFRDFYIHWVRQAPGQGLEWMGRVYPGSGSYRYNEKFKGRVTITADTSTSTAYMELSSLRSEDTAVYYCAGSYYSYDVLDYWGQGTTVTVSS

SEQ ID NO: 89 - protein, 246 aa, Artificial Sequence
  Description of Artificial Sequence: Synthetic polypeptide
QVQLVQSGAEVKKPGSSVKVSCKASGHDFKLTYIHWVRQAPGQGLEWMGRISAGSGNVKYNEKFKGRVTITADTSTSTAYMELSSLRSEDTAVYYCAGSYYSYDVLDYWGQGTTVTVSSGGGGSGGGGSGGGGSGGGGSDIQMTQSPSFLSASVGDRVTITCKASQNVDNRVAWYQQKPGKAPKALIYSSSHRYKGVPSRFSGSGSGTEFTLTISSLQPEDFATYFCQQFKSYPLTFGQGTKLEIK

SEQ ID NO: 90 - protein, 107 aa, Artificial Sequence
  Description of Artificial Sequence: Synthetic polypeptide
DIQMTQSPSFLSASVGDRVTITCKASQNVDNRVAWYQQKPGKAPKALIYSSSHRYKGVPSRFSGSGSGTEFTLTISSLQPEDFATYFCQQFKSYPLTFGQGTKLEIK

SEQ ID NO: 91 - protein, 119 aa, Artificial Sequence
  Description of Artificial Sequence: Synthetic polypeptide
QVQLVQSGAEVKKPGSSVKVSCKASGHDFKLTYIHWVRQAPGQGLEWMGRISAGSGNVKYNEKFKGRVTITADTSTSTAYMELSSLRSEDTAVYYCAGSYYSYDVLDYWGQGTTVTVSS

SEQ ID NO: 92 - protein, 246 aa, Artificial Sequence
  Description of Artificial Sequence: Synthetic polypeptide
QVQLVQSGAEVKKPGSSVKVSCKASGTDFKLTYIHWVRQAPGQGLEWMGRIFPGSGNVKYNEKFKGRVTITADTSTSTAYMELSSLRSEDTAVYYCAGSYYSYDVLDYWGQGTTVTVSSGGGGSGGGGSGGGGSGGGGSDIQMTQSPSFLSASVGDRVTITCKASQNVENKVAWHQQKPGKAPKALIYSSSHRYKGVPSRFSGSGSGTEFTLTISSLQPEDFATYFCQQFKSYPLTFGQGTKLEIK

SEQ ID NO: 93 - protein, 107 aa, Artificial Sequence
  Description of Artificial Sequence: Synthetic polypeptide
DIQMTQSPSFLSASVGDRVTITCKASQNVENKVAWHQQKPGKAPKALIYSSSHRYKGVPSRFSGSGSGTEFTLTISSLQPEDFATYFCQQFKSYPLTFGQGTKLEIK

SEQ ID NO: 94 - protein, 119 aa, Artificial Sequence
  Description of Artificial Sequence: Synthetic polypeptide
QVQLVQSGAEVKKPGSSVKVSCKASGTDFKLTYIHWVRQAPGQGLEWMGRIFPGSGNVKYNEKFKGRVTITADTSTSTAYMELSSLRSEDTAVYYCAGSYYSYDVLDYWGQGTTVTVSS

SEQ ID NO: 95 - protein, 246 aa, Artificial Sequence
  Description of Artificial Sequence: Synthetic polypeptide
QVQLVQSGAEVKKPGSSVKVSCKASGTDFDKIYIHWVRQAPGQGLEWMGRIFAGSGNTKYNEKFKGRVTITADTSTSTAYMELSSLRSEDTAVYYCAGSYYSYDVLDYWGQGTTVTVSSGGGGSGGGGSGGGGSGGGGSDIQMTQSPSFLSASVGDRVTITCKASQNVDDRVAWYQQKPGKAPKALIYSSSHRYKGVPSRFSGSGSGTEFTLTISSLQPEDFATYFCQQFKSYPLTFGQGTKLEIK

SEQ ID NO: 96 - protein, 107 aa, Artificial Sequence; identical to SEQ ID NO: 87
  Description of Artificial Sequence: Synthetic polypeptide

SEQ ID NO: 97 - protein, 119 aa, Artificial Sequence
  Description of Artificial Sequence: Synthetic polypeptide
QVQLVQSGAEVKKPGSSVKVSCKASGTDFDKIYIHWVRQAPGQGLEWMGRIFAGSGNTKYNEKFKGRVTITADTSTSTAYMELSSLRSEDTAVYYCAGSYYSYDVLDYWGQGTTVTVSS

SEQ ID NO: 98 - protein, 246 aa, Artificial Sequence
  Description of Artificial Sequence: Synthetic polypeptide
QVQLVQSGAEVKKPGSSVKVSCKASGHDFDKFYIHWVRQAPGQGLEWMGRVSAGSGNVKYNEKFKGRVTITADTSTSTAYMELSSLRSEDTAVYYCAGSYYSYDVLDYWGQGTTVTVSSGGGGSGGGGSGGGGSGGGGSDIQMTQSPSFLSASVGDRVTITCKASQNVGNRVAWYQQKPGKAPKALIYSSSHRYSGVPSRFSGSGSGTEFTLTISSLQPEDFATYFCQQFKSYPLTFGQGTKLEIK

SEQ ID NO: 99 - protein, 107 aa, Artificial Sequence
  Description of Artificial Sequence: Synthetic polypeptide
DIQMTQSPSFLSASVGDRVTITCKASQNVGNRVAWYQQKPGKAPKALIYSSSHRYSGVPSRFSGSGSGTEFTLTISSLQPEDFATYFCQQFKSYPLTFGQGTKLEIK

SEQ ID NO: 100 - protein, 119 aa, Artificial Sequence
  Description of Artificial Sequence: Synthetic polypeptide
QVQLVQSGAEVKKPGSSVKVSCKASGHDFDKFYIHWVRQAPGQGLEWMGRVSAGSGNVKYNEKFKGRVTITADTSTSTAYMELSSLRSEDTAVYYCAGSYYSYDVLDYWGQGTTVTVSS

SEQ ID NO: 101 - protein, 247 aa, Artificial Sequence
  Description of Artificial Sequence: Synthetic polypeptide
QVQLVQSGAEVKKPGSSVKVSCKASGHDFDKFYIHWVRQAPGQGLEWMGRIFAGSGNVKYNEKFKGRVTITADTSTSTAYMELSSLRSEDTAVYYCAGSYYSYDVLDYWGQGTTVTVSSGGGGSGGGGSGGGGSGGGGSDIQMTQSPSFLSASVGDRVTITCKASQNVGDRVAWYQQKPGKAPKALIYSSSHRYKGVPSRFSGSGSGTEFTLTISSLQPEDFATYFCQQFKSYPLTFGQGTKLEIKS

SEQ ID NO: 102 - protein, 107 aa, Artificial Sequence
  Description of Artificial Sequence: Synthetic polypeptide
DIQMTQSPSFLSASVGDRVTITCKASQNVGDRVAWYQQKPGKAPKALIYSSSHRYKGVPSRFSGSGSGTEFTLTISSLQPEDFATYFCQQFKSYPLTFGQGTKLEIK

SEQ ID NO: 103 - protein, 119 aa, Artificial Sequence
  Description of Artificial Sequence: Synthetic polypeptide
QVQLVQSGAEVKKPGSSVKVSCKASGHDFDKFYIHWVRQAPGQGLEWMGRIFAGSGNVKYNEKFKGRVTITADTSTSTAYMELSSLRSEDTAVYYCAGSYYSYDVLDYWGQGTTVTVSS

SEQ ID NO: 104 - protein, 246 aa, Artificial Sequence
  Description of Artificial Sequence: Synthetic polypeptide
QVQLVQSGAEVKKPGSSVKVSCKASGTDFKLTYIHWVRQAPGQGLEWMGRVSPGSGNVKYNEKFKGRVTITADTSTSTAYMELSSLRSEDTAVYYCAGSYYSYDVLDYWGQGTTVTVSSGGGGSGGGGSGGGGSGGGGSDIQMTQSPSFLSASVGDRVTITCKASQNVGDRVAWYQQKPGKAPKALIYSSSHRYKGVPSRFSGSGSGTEFTLTISSLQPEDFATYFCQQFKSYPLTFGQGTKLEIK

SEQ ID NO: 105 - protein, 107 aa, Artificial Sequence; identical to SEQ ID NO: 102
  Description of Artificial Sequence: Synthetic polypeptide

SEQ ID NO: 106 - protein, 119 aa, Artificial Sequence
  Description of Artificial Sequence: Synthetic polypeptide
QVQLVQSGAEVKKPGSSVKVSCKASGTDFKLTYIHWVRQAPGQGLEWMGRVSPGSGNVKYNEKFKGRVTITADTSTSTAYMELSSLRSEDTAVYYCAGSYYSYDVLDYWGQGTTVTVSS

SEQ ID NO: 107 - protein, 246 aa, Artificial Sequence
  Description of Artificial Sequence: Synthetic polypeptide
QVQLVQSGAEVKKPGSSVKVSCKASGTDFDKIYIHWVRQAPGQGLEWMGRVSAGSGNTKYNEKFKGRVTITADTSTSTAYMELSSLRSEDTAVYYCAGSYYSYDVLDYWGQGTTVTVSSGGGGSGGGGSGGGGSGGGGSDIQMTQSPSFLSASVGDRVTITCKASQNVGNRVAWYQQKPGKAPKALIYSSSHRYKGVPSRFSGSGSGTEFTLTISSLQPEDFATYFCQQFKSYPLTFGQGTKLEIK

SEQ ID NO: 108 - protein, 107 aa, Artificial Sequence
  Description of Artificial Sequence: Synthetic polypeptide
DIQMTQSPSFLSASVGDRVTITCKASQNVGNRVAWYQQKPGKAPKALIYSSSHRYKGVPSRFSGSGSGTEFTLTISSLQPEDFATYFCQQFKSYPLTFGQGTKLEIK

SEQ ID NO: 109 - protein, 119 aa, Artificial Sequence
  Description of Artificial Sequence: Synthetic polypeptide
QVQLVQSGAEVKKPGSSVKVSCKASGTDFDKIYIHWVRQAPGQGLEWMGRVSAGSGNTKYNEKFKGRVTITADTSTSTAYMELSSLRSEDTAVYYCAGSYYSYDVLDYWGQGTTVTVSS

SEQ ID NO: 110 - protein, 246 aa, Artificial Sequence
  Description of Artificial Sequence: Synthetic polypeptide
QVQLVQSGAEVKKPGSSVKVSCKASGTDFKLTYIHWVRQAPGQGLEWMGRIFPGSGNVKYNEKFKGRVTITADTSTSTAYMELSSLRSEDTAVYYCAGSYYSYDVLDYWGQGTTVTVSSGGGGSGGGGSGGGGSGGGGSDIQMTQSPSFLSASVGDRVTITCKASQNVDNRVAWYQQKPGKAPKALIYSSSHRYKGVPSRFSGSGSGTEFTLTISSLQPEDFATYFCQQFKSYPLTFGQGTKLEIK

SEQ ID NO: 111 - protein, 107 aa, Artificial Sequence; identical to SEQ ID NO: 90
  Description of Artificial Sequence: Synthetic polypeptide

SEQ ID NO: 112 - protein, 119 aa, Artificial Sequence; identical to SEQ ID NO: 94
  Description of Artificial Sequence: Synthetic polypeptide

SEQ ID NO: 113 - protein, 246 aa, Artificial Sequence
  Description of Artificial Sequence: Synthetic polypeptide
QVQLVQSGAEVKKPGSSVKVSCKASGTDFDKIYIHWVRQAPGQGLEWMGRISAGSGNTKYNEKFKGRVTITADTSTSTAYMELSSLRSEDTAVYYCAGSYYSYDVLDYWGQGTTVTVSSGGGGSGGGGSGGGGSGGGGSDIQMTQSPSFLSASVGDRVTITCKASQNVDDRVAWYQQKPGKAPKALIYSSSHRYKGVPSRFSGSGSGTEFTLTISSLQPEDFATYFCQQFKSYPLTFGQGTKLEIK

SEQ ID NO: 114 - protein, 107 aa, Artificial Sequence; identical to SEQ ID NO: 87
  Description of Artificial Sequence: Synthetic polypeptide

SEQ ID NO: 115 - protein, 119 aa, Artificial Sequence
  Description of Artificial Sequence: Synthetic polypeptide
QVQLVQSGAEVKKPGSSVKVSCKASGTDFDKIYIHWVRQAPGQGLEWMGRISAGSGNTKYNEKFKGRVTITADTSTSTAYMELSSLRSEDTAVYYCAGSYYSYDVLDYWGQGTTVTVSS

SEQ ID NO: 116 - protein, 246 aa, Artificial Sequence
  Description of Artificial Sequence: Synthetic polypeptide
QVQLVQSGAEVKKPGSSVKVSCKASGTDFRLTYIHWVRQAPGQGLEWMGRVSPGSGNTKYNEKFKGRVTITADTSTSTAYMELSSLRSEDTAVYYCAGSYYSYDVLDYWGQGTTVTVSSGGGGSGGGGSGGGGSGGGGSDIQMTQSPSFLSASVGDRVTITCKASQNVDNKVAWHQQKPGKAPKALIYSSSHRYKGVPSRFSGSGSGTEFTLTISSLQPEDFATYFCQQFKSYPLTFGQGTKLEIK

SEQ ID NO: 117 - protein, 107 aa, Artificial Sequence
  Description of Artificial Sequence: Synthetic polypeptide
DIQMTQSPSFLSASVGDRVTITCKASQNVDNKVAWHQQKPGKAPKALIYSSSHRYKGVPSRFSGSGSGTEFTLTISSLQPEDFATYFCQQFKSYPLTFGQGTKLEIK

SEQ ID NO: 118 - protein, 119 aa, Artificial Sequence
  Description of Artificial Sequence: Synthetic polypeptide
QVQLVQSGAEVKKPGSSVKVSCKASGTDFRLTYIHWVRQAPGQGLEWMGRVSPGSGNTKYNEKFKGRVTITADTSTSTAYMELSSLRSEDTAVYYCAGSYYSYDVLDYWGQGTTVTVSS

SEQ ID NO: 119 - protein, 246 aa, Artificial Sequence
  Description of Artificial Sequence: Synthetic polypeptide
QVQLVQSGAEVKKPGSSVKVSCKASGGTFRLTYIHWVRQAPGQGLEWMGRVYPGSGNTKYNEKFKGRVTITADTSTSTAYMELSSLRSEDTAVYYCAGSYYSYDVLDYWGQGTTVTVSSGGGGSGGGGSGGGGSGGGGSDIQMTQSPSFLSASVGDRVTITCKASQNVDDRVAWYQQKPGKAPKALIYSSSHRYKGVPSRFSGSGSGTEFTLTISSLQPEDFATYFCQQFKSYPLTFGQGTKLEIK

SEQ ID NO: 120 - protein, 107 aa, Artificial Sequence; identical to SEQ ID NO: 87
  Description of Artificial Sequence: Synthetic polypeptide

SEQ ID NO: 121 - protein, 119 aa, Artificial Sequence
  Description of Artificial Sequence: Synthetic polypeptide
QVQLVQSGAEVKKPGSSVKVSCKASGGTFRLTYIHWVRQAPGQGLEWMGRVYPGSGNTKYNEKFKGRVTITADTSTSTAYMELSSLRSEDTAVYYCAGSYYSYDVLDYWGQGTTVTVSS

SEQ ID NO: 122 - protein, 246 aa, Artificial Sequence
  Description of Artificial Sequence: Synthetic polypeptide
QVQLVQSGAEVKKPGSSVKVSCKASGTDFRLTYIHWVRQAPGQGLEWMGRIFPGSGNTKYNEKFKGRVTITADTSTSTAYMELSSLRSEDTAVYYCAGSYYSYDVLDYWGQGTTVTVSSGGGGSGGGGSGGGGSGGGGSDIQMTQSPSFLSASVGDRVTITCKASQNVDDRVAWYQQKPGKAPKALIYSSSHRYKGVPSRFSGSGSGTEFTLTISSLQPEDFATYFCQQFKSYPLTFGQGTKLEIK

SEQ ID NO: 123 - protein, 107 aa, Artificial Sequence; identical to SEQ ID NO: 87
  Description of Artificial Sequence: Synthetic polypeptide

SEQ ID NO: 124 - protein, 119 aa, Artificial Sequence
  Description of Artificial Sequence: Synthetic polypeptide
QVQLVQSGAEVKKPGSSVKVSCKASGTDFRLTYIHWVRQAPGQGLEWMGRIFPGSGNTKYNEKFKGRVTITADTSTSTAYMELSSLRSEDTAVYYCAGSYYSYDVLDYWGQGTTVTVSS

SEQ ID NO: 125 - protein, 246 aa, Artificial Sequence
  Description of Artificial Sequence: Synthetic polypeptide
QVQLVQSGAEVKKPGSSVKVSCKASGTDFKLTYIHWVRQAPGQGLEWMGRIFPGSGNVKYNEKFKGRVTITADTSTSTAYMELSSLRSEDTAVYYCAGSYYSYDVLDYWGQGTTVTVSSGGGGSGGGGSGGGGSGGGGSDIQMTQSPSFLSASVGDRVTITCKASQNVEDRVAWYQQKPGKAPKALIYSSSHRYKGVPSRFSGSGSGTEFTLTISSLQPEDFATYFCQQFKSYPLTFGQGTKLEIK

SEQ ID NO: 126 - protein, 107 aa, Artificial Sequence; identical to SEQ ID NO: 81
  Description of Artificial Sequence: Synthetic polypeptide

SEQ ID NO: 127 - protein, 119 aa, Artificial Sequence; identical to SEQ ID NO: 94
  Description of Artificial Sequence: Synthetic polypeptide

SEQ ID NO: 128 - protein, 246 aa, Artificial Sequence
  Description of Artificial Sequence: Synthetic polypeptide
QVQLVQSGAEVKKPGSSVKVSCKASGGTFRLTYIHWVRQAPGQGLEWMGRISAGSGNVKYNEKFKGRVTITADTSTSTAYMELSSLRSEDTAVYYCAGSYYSYDVLDYWGQGTTVTVSSGGGGSGGGGSGGGGSGGGGSDIQMTQSPSFLSASVGDRVTITCKASQNVGDRVAWYQQKPGKAPKALIYSSSHRYKGVPSRFSGSGSGTEFTLTISSLQPEDFATYFCQQFKSYPLTFGQGTKLEIK

SEQ ID NO: 129 - protein, 107 aa, Artificial Sequence; identical to SEQ ID NO: 102
  Description of Artificial Sequence: Synthetic polypeptide

SEQ ID NO: 130 - protein, 119 aa, Artificial Sequence
  Description of Artificial Sequence: Synthetic polypeptide
QVQLVQSGAEVKKPGSSVKVSCKASGGTFRLTYIHWVRQAPGQGLEWMGRISAGSGNVKYNEKFKGRVTITADTSTSTAYMELSSLRSEDTAVYYCAGSYYSYDVLDYWGQGTTVTVSS

SEQ ID NO: 131 - protein, 246 aa, Artificial Sequence
  Description of Artificial Sequence: Synthetic polypeptide
QVQLVQSGAEVKKPGSSVKVSCKASGGTFDKTYIHWVRQAPGQGLEWMGRISAGSGNTKYNEKFKGRVTITADTSTSTAYMELSSLRSEDTAVYYCAGSYYSYDVLDYWGQGTTVTVSSGGGGSGGGGSGGGGSGGGGSDIQMTQSPSFLSASVGDRVTITCKASQNVDDRVAWYQQKPGKAPKALIYSSSHRYKGVPSRFSGSGSGTEFTLTISSLQPEDFATYFCQQFKSYPLTFGQGTKLEIK

SEQ ID NO: 132 - protein, 107 aa, Artificial Sequence; identical to SEQ ID NO: 87
  Description of Artificial Sequence: Synthetic polypeptide

SEQ ID NO: 133 - protein, 119 aa, Artificial Sequence
  Description of Artificial Sequence: Synthetic polypeptide
QVQLVQSGAEVKKPGSSVKVSCKASGGTFDKTYIHWVRQAPGQGLEWMGRISAGSGNTKYNEKFKGRVTITADTSTSTAYMELSSLRSEDTAVYYCAGSYYSYDVLDYWGQGTTVTVSS

SEQ ID NO: 134 - protein, 246 aa, Artificial Sequence
  Description of Artificial Sequence: Synthetic polypeptide
QVQLVQSGAEVKKPGSSVKVSCKASGHDFDKFYIHWVRQAPGQGLEWMGRISAGSGNTKYNEKFKGRVTITADTSTSTAYMELSSLRSEDTAVYYCAGSYYSYDVLDYWGQGTTVTVSSGGGGSGGGGSGGGGSGGGGSDIQMTQSPSFLSASVGDRVTITCKASQNVDDRVAWYQQKPGKAPKALIYSSSHRYKGVPSRFSGSGSGTEFTLTISSLQPEDFATYFCQQFKSYPLTFGQGTKLEIK

SEQ ID NO: 135 - protein, 107 aa, Artificial Sequence; identical to SEQ ID NO: 87
  Description of Artificial Sequence: Synthetic polypeptide

SEQ ID NO: 136 - protein, 119 aa, Artificial Sequence
  Description of Artificial Sequence: Synthetic polypeptide
QVQLVQSGAEVKKPGSSVKVSCKASGHDFDKFYIHWVRQAPGQGLEWMGRISAGSGNTKYNEKFKGRVTITADTSTSTAYMELSSLRSEDTAVYYCAGSYYSYDVLDYWGQGTTVTVSS

SEQ ID NO: 137 - protein, 246 aa, Artificial Sequence
  Description of Artificial Sequence: Synthetic polypeptide
QVQLVQSGAEVKKPGSSVKVSCKASGTDFKLTYIHWVRQAPGQGLEWMGRISAGSGNVKYNEKFKGRVTITADTSTSTAYMELSSLRSEDTAVYYCAGSYYSYDVLDYWGQGTTVTVSSGGGGSGGGGSGGGGSGGGGSDIQMTQSPSFLSASVGDRVTITCKASQNVDNKVAWHQQKPGKAPKALIYSSSHRYKGVPSRFSGSGSGTEFTLTISSLQPEDFATYFCQQFKSYPLTFGQGTKLEIK

SEQ ID NO: 138 - protein, 107 aa, Artificial Sequence; identical to SEQ ID NO: 117
  Description of Artificial Sequence: Synthetic polypeptide

SEQ ID NO: 139 - protein, 119 aa, Artificial Sequence
  Description of Artificial Sequence: Synthetic polypeptide
QVQLVQSGAEVKKPGSSVKVSCKASGTDFKLTYIHWVRQAPGQGLEWMGRISAGSGNVKYNEKFKGRVTITADTSTSTAYMELSSLRSEDTAVYYCAGSYYSYDVLDYWGQGTTVTVSS

SEQ ID NO: 140 - protein, 246 aa, Artificial Sequence
  Description of Artificial Sequence: Synthetic polypeptide
QVQLVQSGAEVKKPGSSVKVSCKASGHDFRLTYIHWVRQAPGQGLEWMGRISAGSGNVKYNEKFKGRVTITADTSTSTAYMELSSLRSEDTAVYYCAGSYYSYDVLDYWGQGTTVTVSSGGGGSGGGGSGGGGSGGGGSDIQMTQSPSFLSASVGDRVTITCKASQNVADRVAWYQQKPGKAPKALIYSSSHRYKGVPSRFSGSGSGTEFTLTISSLQPEDFATYFCQQFKSYPLTFGQGTKLEIK

SEQ ID NO: 141 - protein, 107 aa, Artificial Sequence
  Description of Artificial Sequence: Synthetic polypeptide
DIQMTQSPSFLSASVGDRVTITCKASQNVADRVAWYQQKPGKAPKALIYSSSHRYKGVPSRFSGSGSGTEFTLTISSLQPEDFATYFCQQFKSYPLTFGQGTKLEIK

SEQ ID NO: 142 - protein, 119 aa, Artificial Sequence
  Description of Artificial Sequence: Synthetic polypeptide
QVQLVQSGAEVKKPGSSVKVSCKASGHDFRLTYIHWVRQAPGQGLEWMGRISAGSGNVKYNEKFKGRVTITADTSTSTAYMELSSLRSEDTAVYYCAGSYYSYDVLDYWGQGTTVTVSS

SEQ ID NO: 143 - protein, 246 aa, Artificial Sequence
  Description of Artificial Sequence: Synthetic polypeptide
QVQLVQSGAEVKKPGSSVKVSCKASGHDFHLWYIHWVRQAPGQGLEWMGRVSAGSGNVKYNEKFKGRVTITADTSTSTAYMELSSLRSEDTAVYYCAGSYYSYDVLDYWGQGTTVTVSSGGGGSGGGGSGGGGSGGGGSDIQMTQSPSFLSASVGDRVTITCKASQNVDNKVAWHQQKPGKAPKALIYSSSHRYKGVPSRFSGSGSGTEFTLTISSLQPEDFATYFCQQFKSYPLTFGQGTKLEIK

SEQ ID NO: 144 - protein, 107 aa, Artificial Sequence; identical to SEQ ID NO: 117
  Description of Artificial Sequence: Synthetic polypeptide

SEQ ID NO: 145 - protein, 119 aa, Artificial Sequence
  Description of Artificial Sequence: Synthetic polypeptide
QVQLVQSGAEVKKPGSSVKVSCKASGHDFHLWYIHWVRQAPGQGLEWMGRVSAGSGNVKYNEKFKGRVTITADTSTSTAYMELSSLRSEDTAVYYCAGSYYSYDVLDYWGQGTTVTVSS

SEQ ID NO: 146 - protein, 246 aa, Artificial Sequence
  Description of Artificial Sequence: Synthetic polypeptide
QVQLVQSGAEVKKPGSSVKVSCKASGHDFHLWYIHWVRQAPGQGLEWMGRVFAGSGNTKYNEKFKGRVTITADTSTSTAYMELSSLRSEDTAVYYCAGSYYSYDVLDYWGQGTTVTVSSGGGGSGGGGSGGGGSGGGGSDIQMTQSPSFLSASVGDRVTITCKASQNVEDKVAWYQQKPGKAPKALIYSSSHRYKGVPSRFSGSGSGTEFTLTISSLQPEDFATYFCQQFKSYPLTFGQGTKLEIK

SEQ ID NO: 147 - protein, 107 aa, Artificial Sequence
  Description of Artificial Sequence: Synthetic polypeptide
DIQMTQSPSFLSASVGDRVTITCKASQNVEDKVAWYQQKPGKAPKALIYSSSHRYKGVPSRFSGSGSGTEFTLTISSLQPEDFATYFCQQFKSYPLTFGQGTKLEIK

SEQ ID NO: 148 - protein, 119 aa, Artificial Sequence
  Description of Artificial Sequence: Synthetic polypeptide
QVQLVQSGAEVKKPGSSVKVSCKASGHDFHLWYIHWVRQAPGQGLEWMGRVFAGSGNTKYNEKFKGRVTITADTSTSTAYMELSSLRSEDTAVYYCAGSYYSYDVLDYWGQGTTVTVSS

SEQ ID NO: 149 - protein, 246 aa, Artificial Sequence
  Description of Artificial Sequence: Synthetic polypeptide
QVQLVQSGAEVKKPGSSVKVSCKASGTDFKLTYIHWVRQAPGQGLEWMGRIFPGSGNTKYNEKFKGRVTITADTSTSTAYMELSSLRSEDTAVYYCAGSYYSYDVLDYWGQGTTVTVSSGGGGSGGGGSGGGGSGGGGSDIQMTQSPSFLSASVGDRVTITCKASQNVDDRVAWYQQKPGKAPKALIYSSSHRYKGVPSRFSGSGSGTEFTLTISSLQPEDFATYFCQQFKSYPLTFGQGTKLEIK

SEQ ID NO: 150 - protein, 107 aa, Artificial Sequence; identical to SEQ ID NO: 87
  Description of Artificial Sequence: Synthetic polypeptide

SEQ ID NO: 151 - protein, 119 aa, Artificial Sequence
  Description of Artificial Sequence: Synthetic polypeptide
QVQLVQSGAEVKKPGSSVKVSCKASGTDFKLTYIHWVRQAPGQGLEWMGRIFPGSGNTKYNEKFKGRVTITADTSTSTAYMELSSLRSEDTAVYYCAGSYYSYDVLDYWGQGTTVTVSS

SEQ ID NO: 152 - protein, 10 aa, Artificial Sequence
  Description of Artificial Sequence: Synthetic peptide
GFTFSNFGMH

SEQ ID NO: 153 - protein, 246 aa, Artificial Sequence
  Description of Artificial Sequence: Synthetic polypeptide
QVQLVQSGAEVKKPGSSVKVSCKASGTDFKLTYIHWVRQAPGQGLEWMGRVSAGSGNVKYNEKFKGRVTITADTSTSTAYMELSSLRSEDTAVYYCAGSYYSYDVLDYWGQGTTVTVSSGGGGSGGGGSGGGGSGGGGSDIQMTQSPSFLSASVGDRVTITCKASQNVGNRVAWYQQKPGKAPKALIYSSSHRYKGVPSRFSGSGSGTEFTLTISSLQPEDFATYFCQQFKSYPLTFGQGTKLEIK

SEQ ID NO: 154 - protein, 107 aa, Artificial Sequence; identical to SEQ ID NO: 108
  Description of Artificial Sequence: Synthetic polypeptide

SEQ ID NO: 155 - protein, 119 aa, Artificial Sequence
  Description of Artificial Sequence: Synthetic polypeptide
QVQLVQSGAEVKKPGSSVKVSCKASGTDFKLTYIHWVRQAPGQGLEWMGRVSAGSGNVKYNEKFKGRVTITADTSTSTAYMELSSLRSEDTAVYYCAGSYYSYDVLDYWGQGTTVTVSS

SEQ ID NO: 156 - protein, 246 aa, Artificial Sequence
  Description of Artificial Sequence: Synthetic polypeptide
QVQLVQSGAEVKKPGSSVKVSCKASGTDFKLTYIHWVRQAPGQGLEWMGRISPGSGNTKYNEKFKGRVTITADTSTSTAYMELSSLRSEDTAVYYCAGSYYSYDVLDYWGQGTTVTVSSGGGGSGGGGSGGGGSGGGGSDIQMTQSPSFLSASVGDRVTITCKASQNVGDRVAWYQQKPGKAPKALIYSSSHRYKGVPSRFSGSGSGTEFTLTISSLQPEDFATYFCQQFKSYPLTFGQGTKLEIK

SEQ ID NO: 157 - protein, 107 aa, Artificial Sequence; identical to SEQ ID NO: 102
  Description of Artificial Sequence: Synthetic polypeptide

SEQ ID NO: 158 - protein, 119 aa, Artificial Sequence
  Description of Artificial Sequence: Synthetic polypeptide
QVQLVQSGAEVKKPGSSVKVSCKASGTDFKLTYIHWVRQAPGQGLEWMGRISPGSGNTKYNEKFKGRVTITADTSTSTAYMELSSLRSEDTAVYYCAGSYYSYDVLDYWGQGTTVTVSS

SEQ ID NO: 159 - protein, 246 aa, Artificial Sequence
  Description of Artificial Sequence: Synthetic polypeptide
QVQLVQSGAEVKKPGSSVKVSCKASGHDFHLWYIHWVRQAPGQGLEWMGRISPGSGNVKYNEKFKGRVTITADTSTSTAYMELSSLRSEDTAVYYCAGSYYSYDVLDYWGQGTTVTVSSGGGGSGGGGSGGGGSGGGGSDIQMTQSPSFLSASVGDRVTITCKASQNVGDRVAWHQQKPGKAPKALIYSSSHRYKGVPSRFSGSGSGTEFTLTISSLQPEDFATYFCQQFKSYPLTFGQGTKLEIK

SEQ ID NO: 160 - protein, 107 aa, Artificial Sequence
  Description of Artificial Sequence: Synthetic polypeptide
DIQMTQSPSFLSASVGDRVTITCKASQNVGDRVAWHQQKPGKAPKALIYSSSHRYKGVPSRFSGSGSGTEFTLTISSLQPEDFATYFCQQFKSYPLTFGQGTKLEIK

SEQ ID NO: 161 - protein, 119 aa, Artificial Sequence
  Description of Artificial Sequence: Synthetic polypeptide
QVQLVQSGAEVKKPGSSVKVSCKASGHDFHLWYIHWVRQAPGQGLEWMGRISPGSGNVKYNEKFKGRVTITADTSTSTAYMELSSLRSEDTAVYYCAGSYYSYDVLDYWGQGTTVTVSS

SEQ ID NO: 162 - protein, 246 aa, Artificial Sequence
  Description of Artificial Sequence: Synthetic polypeptide
QVQLVQSGAEVKKPGSSVKVSCKASGHDFKLTYIHWVRQAPGQGLEWMGRISAGSGNVKYNEKFKGRVTITADTSTSTAYMELSSLRSEDTAVYYCAGSYYSYDVLDYWGQGTTVTVSSGGGGSGGGGSGGGGSGGGGSDIQMTQSPSFLSASVGDRVTITCKASQNVDDRVAWYQQKPGKAPKALIYSSSHRYKGVPSRFSGSGSGTEFTLTISSLQPEDFATYFCQQFKSYPLTFGQGTKLEIK

SEQ ID NO: 163 - protein, 107 aa, Artificial Sequence; identical to SEQ ID NO: 87
  Description of Artificial Sequence: Synthetic polypeptide

SEQ ID NO: 164 - protein, 119 aa, Artificial Sequence; identical to SEQ ID NO: 91
  Description of Artificial Sequence: Synthetic polypeptide

SEQ ID NO: 165 - protein, 246 aa, Artificial Sequence
  Description of Artificial Sequence: Synthetic polypeptide
QVQLVQSGAEVKKPGSSVKVSCKASGTDFHLWYIHWVRQAPGQGLEWMGRVFAGSGSYRYNEKFKGRVTITADTSTSTAYMELSSLRSEDTAVYYCAGSYYSYDVLDYWGQGTTVTVSSGGGGSGGGGSGGGGSGGGGSDIQMTQSPSFLSASVGDRVTITCKASQNVDDRVAWYQQKPGKAPKALIYSSSHRYKGVPSRFSGSGSGTEFTLTISSLQPEDFATYFCQQFKSYPLTFGQGTKLEIK

SEQ ID NO: 166 - protein, 107 aa, Artificial Sequence; identical to SEQ ID NO: 87
  Description of Artificial Sequence: Synthetic polypeptide

SEQ ID NO: 167 - protein, 119 aa, Artificial Sequence
  Description of Artificial Sequence: Synthetic polypeptide
QVQLVQSGAEVKKPGSSVKVSCKASGTDFHLWYIHWVRQAPGQGLEWMGRVFAGSGSYRYNEKFKGRVTITADTSTSTAYMELSSLRSEDTAVYYCAGSYYSYDVLDYWGQGTTVTVSS

SEQ ID NO: 168 - protein, 246 aa, Artificial Sequence
  Description of Artificial Sequence: Synthetic polypeptide
QVQLVQSGAEVKKPGSSVKVSCKASGTDFDKIYIHWVRQAPGQGLEWMGRISAGSGNTKYNEKFKGRVTITADTSTSTAYMELSSLRSEDTAVYYCAGSYYSYDVLDYWGQGTTVTVSSGGGGSGGGGSGGGGSGGGGSDIQMTQSPSFLSASVGDRVTITCKASQNVADRVAWYQQKPGKAPKALIYSSSHRYKGVPSRFSGSGSGTEFTLTISSLQPEDFATYFCQQFKSYPLTFGQGTKLEIK

SEQ ID NO: 169 - protein, 107 aa, Artificial Sequence; identical to SEQ ID NO: 141
  Description of Artificial Sequence: Synthetic polypeptide

SEQ ID NO: 170 - protein, 119 aa, Artificial Sequence; identical to SEQ ID NO: 115
  Description of Artificial Sequence: Synthetic polypeptide

SEQ ID NO: 171 - protein, 246 aa, Artificial Sequence
  Description of Artificial Sequence: Synthetic polypeptide
QVQLVQSGAEVKKPGSSVKVSCKASGTDFKLTYIHWVRQAPGQGLEWMGRISAGSGNTKYNEKFKGRVTITADTSTSTAYMELSSLRSEDTAVYYCAGSYYSYDVLDYWGQGTTVTVSSGGGGSGGGGSGGGGSGGGGSDIQMTQSPSFLSASVGDRVTITCKASQNVEDRVAWYQQKPGKAPKALIYSSSHRYKGVPSRFSGSGSGTEFTLTISSLQPEDFATYFCQQFKSYPLTFGQGTKLEIK

SEQ ID NO: 172 - protein, 107 aa, Artificial Sequence; identical to SEQ ID NO: 81
  Description of Artificial Sequence: Synthetic polypeptide

SEQ ID NO: 173 - protein, 119 aa, Artificial Sequence
  Description of Artificial Sequence: Synthetic polypeptide
QVQLVQSGAEVKKPGSSVKVSCKASGTDFKLTYIHWVRQAPGQGLEWMGRISAGSGNTKYNEKFKGRVTITADTSTSTAYMELSSLRSEDTAVYYCAGSYYSYDVLDYWGQGTTVTVSS

SEQ ID NO: 174 - protein, 246 aa, Artificial Sequence
  Description of Artificial Sequence: Synthetic polypeptide
QVQLVQSGAEVKKPGSSVKVSCKASGTDFRLTYIHWVRQAPGQGLEWMGRISPGSGNTKYNEKFKGRVTITADTSTSTAYMELSSLRSEDTAVYYCAGSYYSYDVLDYWGQGTTVTVSSGGGGSGGGGSGGGGSGGGGSDIQMTQSPSFLSASVGDRVTITCKASQNVGNRVAWYQQKPGKAPKALIYSSSHRYKGVPSRFSGSGSGTEFTLTISSLQPEDFATYFCQQFKSYPLTFGQGTKLEIK

SEQ ID NO: 175 - protein, 107 aa, Artificial Sequence; identical to SEQ ID NO: 108
  Description of Artificial Sequence: Synthetic polypeptide

SEQ ID NO: 176 - protein, 119 aa, Artificial Sequence
  Description of Artificial Sequence: Synthetic polypeptide
QVQLVQSGAEVKKPGSSVKVSCKASGTDFRLTYIHWVRQAPGQGLEWMGRISPGSGNTKYNEKFKGRVTITADTSTSTAYMELSSLRSEDTAVYYCAGSYYSYDVLDYWGQGTTVTVSS

SEQ ID NO: 177 - protein, 246 aa, Artificial Sequence
  Description of Artificial Sequence: Synthetic polypeptide
QVQLVQSGAEVKKPGSSVKVSCKASGHDFDKTYIHWVRQAPGQGLEWMGRVSAGSGNVKYNEKFKGRVTITADTSTSTAYMELSSLRSEDTAVYYCAGSYYSYDVLDYWGQGTTVTVSSGGGGSGGGGSGGGGSGGGGSDIQMTQSPSFLSASVGDRVTITCKASQNVEDRVAWYQQKPGKAPKALIYSSSHRYKGVPSRFSGSGSGTEFTLTISSLQPEDFATYFCQQFKSYPLTFGQGTKLEIK

SEQ ID NO: 178 - protein, 107 aa, Artificial Sequence; identical to SEQ ID NO: 81
  Description of Artificial Sequence: Synthetic polypeptide

SEQ ID NO: 179 - protein, 119 aa, Artificial Sequence
  Description of Artificial Sequence: Synthetic polypeptide
QVQLVQSGAEVKKPGSSVKVSCKASGHDFDKTYIHWVRQAPGQGLEWMGRVSAGSGNVKYNEKFKGRVTITADTSTSTAYMELSSLRSEDTAVYYCAGSYYSYDVLDYWGQGTTVTVSS

SEQ ID NO: 180 - protein, 246 aa, Artificial Sequence
  Description of Artificial Sequence: Synthetic polypeptide
QVQLVQSGAEVKKPGSSVKVSCKASGHDFKLTYIHWVRQAPGQGLEWMGRVSPGSGNTKYNEKFKGRVTITADTSTSTAYMELSSLRSEDTAVYYCAGSYYSYDVLDYWGQGTTVTVSSGGGGSGGGGSGGGGSGGGGSDIQMTQSPSFLSASVGDRVTITCKASQNVEDRVAWHQQKPGKAPKALIYSSSHRYKGVPSRFSGSGSGTEFTLTISSLQPEDFATYFCQQFKSYPLTFGQGTKLEIK

SEQ ID NO: 181 - protein, 107 aa, Artificial Sequence
  Description of Artificial Sequence: Synthetic polypeptide
DIQMTQSPSFLSASVGDRVTITCKASQNVEDRVAWHQQKPGKAPKALIYSSSHRYKGVPSRFSGSGSGTEFTLTISSLQPEDFATYFCQQFKSYPLTFGQGTKLEIK

SEQ ID NO: 182 - protein, 119 aa, Artificial Sequence
  Description of Artificial Sequence: Synthetic polypeptide
QVQLVQSGAEVKKPGSSVKVSCKASGHDFKLTYIHWVRQAPGQGLEWMGRVSPGSGNTKYNEKFKGRVTITADTSTSTAYMELSSLRSEDTAVYYCAGSYYSYDVLDYWGQGTTVTVSS

SEQ ID NO: 183 - protein, 246 aa, Artificial Sequence
  Description of Artificial Sequence: Synthetic polypeptide
QVQLVQSGAEVKKPGSSVKVSCKASGHDFDKTYIHWVRQAPGQGLEWMGRIYPGSGNVKYNEKFKGRVTITADTSTSTAYMELSSLRSEDTAVYYCAGSYYSYDVLDYWGQGTTVTVSSGGGGSGGGGSGGGGSGGGGSDIQMTQSPSFLSASVGDRVTITCKASQNVADRVAWYQQKPGKAPKALIYSSSHRYKGVPSRFSGSGSGTEFTLTISSLQPEDFATYFCQQFKSYPLTFGQGTKLEIK

SEQ ID NO: 184 - protein, 107 aa, Artificial Sequence; identical to SEQ ID NO: 141
  Description of Artificial Sequence: Synthetic polypeptide

SEQ ID NO: 185 - protein, 119 aa, Artificial Sequence
  Description of Artificial Sequence: Synthetic polypeptide
QVQLVQSGAEVKKPGSSVKVSCKASGHDFDKTYIHWVRQAPGQGLEWMGRIYPGSGNVKYNEKFKGRVTITADTSTSTAYMELSSLRSEDTAVYYCAGSYYSYDVLDYWGQGTTVTVSS

SEQ ID NO: 186 - protein, 246 aa, Artificial Sequence
  Description of Artificial Sequence: Synthetic polypeptide
QVQLVQSGAEVKKPGSSVKVSCKASGTDFDKTYIHWVRQAPGQGLEWMGRISAGSGNVKYNEKFKGRVTITADTSTSTAYMELSSLRSEDTAVYYCAGSYYSYDVLDYWGQGTTVTVSSGGGGSGGGGSGGGGSGGGGSDIQMTQSPSFLSASVGDRVTITCKASQNVDDRVAWYQQKPGKAPKALIYSSSHRYKGVPSRFSGSGSGTEFTLTISSLQPEDFATYFCQQFKSYPLTFGQGTKLEIK

SEQ ID NO: 187 - protein, 107 aa, Artificial Sequence; identical to SEQ ID NO: 87
  Description of Artificial Sequence: Synthetic polypeptide

SEQ ID NO: 188 - protein, 119 aa, Artificial Sequence
  Description of Artificial Sequence: Synthetic polypeptide
QVQLVQSGAEVKKPGSSVKVSCKASGTDFDKTYIHWVRQAPGQGLEWMGRISAGSGNVKYNEKFKGRVTITADTSTSTAYMELSSLRSEDTAVYYCAGSYYSYDVLDYWGQGTTVTVSS

SEQ ID NO: 189 - protein, 246 aa, Artificial Sequence
  Description of Artificial Sequence: Synthetic polypeptide
QVQLVQSGAEVKKPGSSVKVSCKASGTDFDKIYIHWVRQAPGQGLEWMGRISAGSGNIKYNEKFKGRVTITADTSTSTAYMELSSLRSEDTAVYYCAGSYYSYDVLDYWGQGTTVTVSSGGGGSGGGGSGGGGSGGGGSDIQMTQSPSFLSASVGDRVTITCKASQNVDDRVAWYQQKPGKAPKALIYSSSHRYKGVPSRFSGSGSGTEFTLTISSLQPEDFATYFCQQFKSYPLTFGQGTKLEIK

SEQ ID NO: 190 - protein, 107 aa, Artificial Sequence; identical to SEQ ID NO: 87
  Description of Artificial Sequence: Synthetic polypeptide

SEQ ID NO: 191 - protein, 119 aa, Artificial Sequence
  Description of Artificial Sequence: Synthetic polypeptide
QVQLVQSGAEVKKPGSSVKVSCKASGTDFDKIYIHWVRQAPGQGLEWMGRISAGSGNIKYNEKFKGRVTITADTSTSTAYMELSSLRSEDTAVYYCAGSYYSYDVLDYWGQGTTVTVSS

SEQ ID NO: 192 - protein, 246 aa, Artificial Sequence
  Description of Artificial Sequence: Synthetic polypeptide
QVQLVQSGAEVKKPGSSVKVSCKASGTDFDKIYIHWVRQAPGQGLEWMGRISAGSGNVKYNEKFKGRVTITADTSTSTAYMELSSLRSEDTAVYYCAGSYYSYDVLDYWGQGTTVTVSSGGGGSGGGGSGGGGSGGGGSDIQMTQSPSFLSASVGDRVTITCKASQNVGDRVAWYQQKPGKAPKALIYSSSHRYKGVPSRFSGSGSGTEFTLTISSLQPEDFATYFCQQFKSYPLTFGQGTKLEIK

SEQ ID NO: 193 - protein, 107 aa, Artificial Sequence; identical to SEQ ID NO: 102
  Description of Artificial Sequence: Synthetic polypeptide

SEQ ID NO: 194 - protein, 119 aa, Artificial Sequence; identical to SEQ ID NO: 85
  Description of Artificial Sequence: Synthetic polypeptide

SEQ ID NO: 195 - protein, 246 aa, Artificial Sequence
  Description of Artificial Sequence: Synthetic polypeptide
QVQLVQSGAEVKKPGSSVKVSCKASGGTFKLTYIHWVRQAPGQGLEWMGRVSAGSGNVKYNEKFKGRVTITADTSTSTAYMELSSLRSEDTAVYYCAGSYYSYDVLDYWGQGTTVTVSSGGGGSGGGGSGGGGSGGGGSDIQMTQSPSFLSASVGDRVTITCKASQNVDDRVAWYQQKPGKAPKALIYSSSHRYKGVPSRFSGSGSGTEFTLTISSLQPEDFATYFCQQFKSYPLTFGQGTKLEIK

SEQ ID NO: 196 - protein, 107 aa, Artificial Sequence; identical to SEQ ID NO: 87
  Description of Artificial Sequence: Synthetic polypeptide

SEQ ID NO: 197 - protein, 119 aa, Artificial Sequence
  Description of Artificial Sequence: Synthetic polypeptide
QVQLVQSGAEVKKPGSSVKVSCKASGGTFKLTYIHWVRQAPGQGLEWMGRVSAGSGNVKYNEKFKGRVTITADTSTSTAYMELSSLRSEDTAVYYCAGSYYSYDVLDYWGQGTTVTVSS

SEQ ID NO: 198 - protein, 246 aa, Artificial Sequence
  Description of Artificial Sequence: Synthetic polypeptide
QVQLVQSGAEVKKPGSSVKVSCKASGTDFKLTYIHWVRQAPGQGLEWMGRISPGSGNVKYNEKFKGRVTITADTSTSTAYMELSSLRSEDTAVYYCAGSYYSYDVLDYWGQGTTVTVSSGGGGSGGGGSGGGGSGGGGSDIQMTQSPSFLSASVGDRVTITCKASQNVDNRVAWHQQKPGKAPKALIYSSSHRYKGVPSRFSGSGSGTEFTLTISSLQPEDFATYFCQQFKSYPLTFGQGTKLEIK

SEQ ID NO: 199 - protein, 107 aa, Artificial Sequence
  Description of Artificial Sequence: Synthetic polypeptide
DIQMTQSPSFLSASVGDRVTITCKASQNVDNRVAWHQQKPGKAPKALIYSSSHRYKGVPSRFSGSGSGTEFTLTISSLQPEDFATYFCQQFKSYPLTFGQGTKLEIK

SEQ ID NO: 200 - protein, 119 aa, Artificial Sequence
  Description of Artificial Sequence: Synthetic polypeptide
QVQLVQSGAEVKKPGSSVKVSCKASGTDFKLTYIHWVRQAPGQGLEWMGRISPGSGNVKYNEKFKGRVTITADTSTSTAYMELSSLRSEDTAVYYCAGSYYSYDVLDYWGQGTTVTVSS

SEQ ID NO: 201 - protein, 246 aa, Artificial Sequence
  Description of Artificial Sequence: Synthetic polypeptide
QVQLVQSGAEVKKPGSSVKVSCKASGHDFDKFYIHWVRQAPGQGLEWMGRVSAGSGNTKYNEKFKGRVTITADTSTSTAYMELSSLRSEDTAVYYCAGSYYSYDVLDYWGQGTTVTVSSGGGGSGGGGSGGGGSGGGGSDIQMTQSPSFLSASVGDRVTITCKASQNVDNRVAWYQQKPGKAPKALIYSSSHRYKGVPSRFSGSGSGTEFTLTISSLQPEDFATYFCQQFKSYPLTFGQGTKLEIK

SEQ ID NO: 202 - protein, 107 aa, Artificial Sequence; identical to SEQ ID NO: 90
  Description of Artificial Sequence: Synthetic polypeptide

SEQ ID NO: 203 - protein, 119 aa, Artificial Sequence
  Description of Artificial Sequence: Synthetic polypeptide
QVQLVQSGAEVKKPGSSVKVSCKASGHDFDKFYIHWVRQAPGQGLEWMGRVSAGSGNTKYNEKFKGRVTITADTSTSTAYMELSSLRSEDTAVYYCAGSYYSYDVLDYWGQGTTVTVSS

SEQ ID NO: 204 - protein, 246 aa, Artificial Sequence
  Description of Artificial Sequence: Synthetic polypeptide
QVQLVQSGAEVKKPGSSVKVSCKASGTDFDKFYIHWVRQAPGQGLEWMGRVSAGSGNVKYNEKFKGRVTITADTSTSTAYMELSSLRSEDTAVYYCAGSYYSYDVLDYWGQGTTVTVSSGGGGSGGGGSGGGGSGGGGSDIQMTQSPSFLSASVGDRVTITCKASQNVGDRVVWYQQKPGKAPKALIYSSSHRYKGVPSRFSGSGSGTEFTLTISSLQPEDFATYFCQQFKSYPLTFGQGTKLEIK

SEQ ID NO: 205 - protein, 119 aa, Artificial Sequence
  Description of Artificial Sequence: Synthetic polypeptide
QVQLVQSGAEVKKPGSSVKVSCKASGTDFDKFYIHWVRQAPGQGLEWMGRVSAGSGNVKYNEKFKGRVTITADTSTSTAYMELSSLRSEDTAVYYCAGSYYSYDVLDYWGQGTTVTVSS

SEQ ID NO: 206 - protein, 246 aa, Artificial Sequence
  Description of Artificial Sequence: Synthetic polypeptide
QVQLVQSGAEVKKPGSSVKVSCKASGYSFTTYYIHWVRQAPGQGLEWMGWFSAGSGNTKYNEKFKGRVTITADTSTSTAYMELSSLRSEDTAVYYCAVSYYSYDVLDYWGQGTTVTVSSGGGGSGGGGSGGGGSGGGGSDIQMTQSPSFLSASVGDRVTITCKASQNVGINVVWHQQKPGKAPKALIYSSSHRYSGVPSRFSGSGSGTEFTLTISSLQPEDFATYFCQQFKSYPLTFGQGTKLEIK

SEQ ID NO: 207 - protein, 119 aa, Artificial Sequence
  Description of Artificial Sequence: Synthetic polypeptide
QVQLVQSGAEVKKPGSSVKVSCKASGYSFTTYYIHWVRQAPGQGLEWMGWFSAGSGNTKYNEKFKGRVTITADTSTSTAYMELSSLRSEDTAVYYCAVSYYSYDVLDYWGQGTTVTVSS

SEQ ID NO: 208 - protein, 246 aa, Artificial Sequence
  Description of Artificial Sequence: Synthetic polypeptide
QVQLVQSGAEVKKPGSSVKVSCKASGYSFTTYYIHWVRQAPGQGLEWMGWFSAGSGNTKYNEKFKGRVTITADTSTSTAYMELSSLRSEDTAVYYCAGSYYSYDVLDYWGQGTTVTVSSGGGGSGGGGSGGGGSGGGGSDIQMTQSPSFLSASVGDRVTITCKASQNVGINVVWHQQKPGKAPKALIYSSSHRYSGVPSRFSGSGSGTEFTLTISSLQPEDFATYFCQQFKSYPLTFGQGTKLEIK

SEQ ID NO: 209 - protein, 119 aa, Artificial Sequence
  Description of Artificial Sequence: Synthetic polypeptide
QVQLVQSGAEVKKPGSSVKVSCKASGYSFTTYYIHWVRQAPGQGLEWMGWFSAGSGNTKYNEKFKGRVTITADTSTSTAYMELSSLRSEDTAVYYCAGSYYSYDVLDYWGQGTTVTVSS

SEQ ID NO: 210 - protein, 246 aa, Artificial Sequence
  Description of Artificial Sequence: Synthetic polypeptide
QVQLVQSGAEVKKPGSSVKVSCKASGYSFTTYYIHWVRQAPGQGLEWMGWFFPGSGNTKYNEKFKGRVTITADTSTSTAYMELSSLRSEDTAVYYCAGSYYSYDVLDYWGQGTTVTVSSGGGGSGGGGSGGGGSGGGGSDIQMTQSPSFLSASVGDRVTITCKASQNVGINVVWHQQKPGKAPKALIYSSSHRYSGVPSRFSGSGSGTEFTLTISSLQPEDFATYFCQQFKSYPLTFGQGTKLEIK

SEQ ID NO: 211 - protein, 119 aa, Artificial Sequence
  Description of Artificial Sequence: Synthetic polypeptide
QVQLVQSGAEVKKPGSSVKVSCKASGYSFTTYYIHWVRQAPGQGLEWMGWFFPGSGNTKYNEKFKGRVTITADTSTSTAYMELSSLRSEDTAVYYCAGSYYSYDVLDYWGQGTTVTVSS

SEQ ID NO: 212 - protein, 246 aa, Artificial Sequence
  Description of Artificial Sequence: Synthetic polypeptide
QVQLVQSGAEVKKPGSSVKVSCKASGYSFTTYYIHWVRQAPGQGLEWMGWFSPGSGNTKYNEKFKGRVTITADTSTSTAYMELSSLRSEDTAVYYCAVSYYSYDVLDYWGQGTTVTVSSGGGGSGGGGSGGGGSGGGGSDIQMTQSPSFLSASVGDRVTITCKASQNVGINVVWHQQKPGKAPKALIYSSSHRYSGVPSRFSGSGSGTEFTLTISSLQPEDFATYFCQQFKSYPLTFGQGTKLEIK

SEQ ID NO: 213 - protein, 119 aa, Artificial Sequence
  Description of Artificial Sequence: Synthetic polypeptide
QVQLVQSGAEVKKPGSSVKVSCKASGYSFTTYYIHWVRQAPGQGLEWMGWFSPGSGNTKYNEKFKGRVTITADTSTSTAYMELSSLRSEDTAVYYCAVSYYSYDVLDYWGQGTTVTVSS

SEQ ID NO: 214 - protein, 246 aa, Artificial Sequence
  Description of Artificial Sequence: Synthetic polypeptide
QVQLVQSGAEVKKPGSSVKVSCKASGYSFTTYYIHWVRQAPGQGLEWMGWFSPGSGNTKYNEKFKGRVTITADTSTSTAYMELSSLRSEDTAVYYCAGSYYSYDVLDYWGQGTTVTVSSGGGGSGGGGSGGGGSGGGGSDIQMTQSPSFLSASVGDRVTITCKASQNVGINVVWHQQKPGKAPKALIYSSSHRYSGVPSRFSGSGSGTEFTLTISSLQPEDFATYFCQQFKSYPLTFGQGTKLEIK

SEQ ID NO: 215 - protein, 119 aa, Artificial Sequence
  Description of Artificial Sequence: Synthetic polypeptide
QVQLVQSGAEVKKPGSSVKVSCKASGYSFTTYYIHWVRQAPGQGLEWMGWFSPGSGNTKYNEKFKGRVTITADTSTSTAYMELSSLRSEDTAVYYCAGSYYSYDVLDYWGQGTTVTVSS

SEQ ID NO: 216 - protein, 246 aa, Artificial Sequence
  Description of Artificial Sequence: Synthetic polypeptide
QVQLVQSGAEVKKPGSSVKVSCKASGYSFTTYYIHWVRQAPGQGLEWMGRIFPGSGNIKYNEKFKGRVTITADTSTSTAYMELSSLRSEDTAVYYCAGSYYSYDVLDYWGQGTTVTVSSGGGGSGGGGSGGGGSGGGGSDIQMTQSPSFLSASVGDRVTITCKASQNVGINVVWHQQKPGKAPKALIYSSSHRYSGVPSRFSGSGSGTEFTLTISSLQPEDFATYFCQQFKSYPLTFGQGTKLEIK

SEQ ID NO: 217 - protein, 119 aa, Artificial Sequence
  Description of Artificial Sequence: Synthetic polypeptide
QVQLVQSGAEVKKPGSSVKVSCKASGYSFTTYYIHWVRQAPGQGLEWMGRIFPGSGNIKYNEKFKGRVTITADTSTSTAYMELSSLRSEDTAVYYCAGSYYSYDVLDYWGQGTTVTVSS

SEQ ID NO: 218 - protein, 246 aa, Artificial Sequence
  Description of Artificial Sequence: Synthetic polypeptide
QVQLVQSGAEVKKPGSSVKVSCKASGYSFTTYYIHWVRQAPGQGLEWMGWFFPGSGNIKYNEKFKGRVTITADTSTSTAYMELSSLRSEDTAVYYCAGSIYSAGVLDYWGQGTTVTVSSGGGGSGGGGSGGGGSGGGGSDIQMTQSPSFLSASVGDRVTITCKASQNVGINVVWHQQKPGKAPKALIYSSSHRYSGVPSRFSGSGSGTEFTLTISSLQPEDFATYFCQQFKSYPLTFGQGTKLEIK

SEQ ID NO: 219 - protein, 119 aa, Artificial Sequence
  Description of Artificial Sequence: Synthetic polypeptide
QVQLVQSGAEVKKPGSSVKVSCKASGYSFTTYYIHWVRQAPGQGLEWMGWFFPGSGNIKYNEKFKGRVTITADTSTSTAYMELSSLRSEDTAVYYCAGSIYSAGVLDYWGQGTTVTVSS

SEQ ID NO: 220 - protein, 246 aa, Artificial Sequence
  Description of Artificial Sequence: Synthetic polypeptide
QVQLVQSGAEVKKPGSSVKVSCKASGYSFTLGYIHWVRQAPGQGLEWMGWFFPGSGNIKYNEKFKGRVTITADTSTSTAYMELSSLRSEDTAVYYCAGSYYSYDVLDYWGQGTTVTVSSGGGGSGGGGSGGGGSGGGGSDIQMTQSPSFLSASVGDRVTITCKASQNVGINVVWHQQKPGKAPKALIYSSSHRYSGVPSRFSGSGSGTEFTLTISSLQPEDFATYFCQQFKSYPLTFGQGTKLEIK

SEQ ID NO: 221 - protein, 119 aa, Artificial Sequence
  Description of Artificial Sequence: Synthetic polypeptide
QVQLVQSGAEVKKPGSSVKVSCKASGYSFTLGYIHWVRQAPGQGLEWMGWFFPGSGNIKYNEKFKGRVTITADTSTSTAYMELSSLRSEDTAVYYCAGSYYSYDVLDYWGQGTTVTVSS

SEQ ID NO: 222 - protein, 246 aa, Artificial Sequence
  Description of Artificial Sequence: Synthetic polypeptide
QVQLVQSGAEVKKPGSSVKVSCKASGYSFRLTYIHWVRQAPGQGLEWMGWFFPGSGNIKYNEKFKGRVTITADTSTSTAYMELSSLRSEDTAVYYCAGSYYSYDVLDYWGQGTTVTVSSGGGGSGGGGSGGGGSGGGGSDIQMTQSPSFLSASVGDRVTITCKASQNVGINVVWHQQKPGKAPKALIYSSSHRYSGVPSRFSGSGSGTEFTLTISSLQPEDFATYFCQQFKSYPLTFGQGTKLEIK

SEQ ID NO: 223 - protein, 119 aa, Artificial Sequence
  Description of Artificial Sequence: Synthetic polypeptide
QVQLVQSGAEVKKPGSSVKVSCKASGYSFRLTYIHWVRQAPGQGLEWMGWFFPGSGNIKYNEKFKGRVTITADTSTSTAYMELSSLRSEDTAVYYCAGSYYSYDVLDYWGQGTTVTVSS

SEQ ID NO: 224 - protein, 246 aa, Artificial Sequence
  Description of Artificial Sequence: Synthetic polypeptide
QVQLVQSGAEVKKPGSSVKVSCKASGYSFHNWYIHWVRQAPGQGLEWMGWFFPGSGNIKYNEKFKGRVTITADTSTSTAYMELSSLRSEDTAVYYCAGSYYSYDVLDYWGQGTTVTVSSGGGGSGGGGSGGGGSGGGGSDIQMTQSPSFLSASVGDRVTITCKASQNVGINVVWHQQKPGKAPKALIYSSSHRYSGVPSRFSGSGSGTEFTLTISSLQPEDFATYFCQQFKSYPLTFGQGTKLEIK

SEQ ID NO: 225 - protein, 119 aa, Artificial Sequence
  Description of Artificial Sequence: Synthetic polypeptide
QVQLVQSGAEVKKPGSSVKVSCKASGYSFHNWYIHWVRQAPGQGLEWMGWFFPGSGNIKYNEKFKGRVTITADTSTSTAYMELSSLRSEDTAVYYCAGSYYSYDVLDYWGQGTTVTVSS

SEQ ID NO: 226 - protein, 17 aa, Artificial Sequence
  Description of Artificial Sequence: Synthetic peptide
YISSGSSTIYYADTLKG

SEQ ID NO: 227 - protein, 133 aa, Unknown
  Description of Unknown: IL-2 cytokine sequence
APTSSSTKKTQLQLEHLLLDLQMILNGINNYKNPKLTRMLTFKFYMPKKATELKHLQCLEEELKPLEEVLNLAQSKNFHLRPRDLISNINVIVLELKGSETTFMCEYADETATIVEFLNRWITFAQSIISTLT

SEQ ID NO: 228 - protein, 133 aa, Unknown
  Description of Unknown: IL-2 cytokine sequence
APASSSTKKTQLQLEHLLLDLQMILNGINNYKNPKLTRMLTAKFAMPKKATELKHLQCLEEELKPLEEVLNGAQSKNFHLRPRDLISNINVIVLELKGSETTFMCEYADETATIVEFLNRWITFAQSIISTLT

SEQ ID NO: 229 - protein, 518 aa, Unknown
  Description of Unknown: IL-12 cytokine sequence
IWELKKDVYVVELDWYPDAPGEMVVLTCDTPEEDGITWTLDQSSEVLGSGKTLTIQVKEFGDAGQYTCHKGGEVLSHSLLLLHKKEDGIWSTDILKDQKEPKNKTFLRCEAKNYSGRFTCWWLTTISTDLTFSVKSSRGSSDPQGVTCGAATLSAERVRGDNKEYEYSVECQEDSACPAAEESLPIEVMVDAVHKLKYENYTSSFFIRDIIKPDPPKNLQLKPLKNSRQVEVSWEYPDTWSTPHSYFSLTFCVQVQGKSKREKKDRVFTDKTSATVICRKNASISVRAQDRYYSSSWSEWASVPCSGGGGSGGGGSGGGGSRNLPVATPDPGMFPCLHHSQNLLRAVSNMLQKARQTLEFYPCTSEEIDHEDITKDKTSTVEACLPLELTKNESCLNSRETSFITNGSCLASRKTSFMMALCLSSIYEDLKMYQVEFKTMNAKLLMDPKRQIFLDQNMLAVIDELMQALNFNSETVPQKSSLEEPDFYKTKIKLCILLHAFRIRAVTIDRVMSYLNAS

SEQ ID NO: 230 - protein, 340 aa, Unknown
  Description of Unknown: IL-10 cytokine sequence
SPGQGTQSENSCTHFPGNLPNMLRDLRDAFSRVKTFFQMKDQLDNLLLKESLLEDFKGYLGCQALSEMIQFYLEEVMPQAENQDPDIKAHVNSLGENLKTLRLRLRRCHRFLPCENKSKAVEQVKNAFNKLQEKGIYKAMSEFDIFINYIEAYMTMKIRNGGGGSGGGGSGGGGSGGGGSSPGQGTQSENSCTHFPGNLPNMLRDLRDAFSRVKTFFQMKDQLDNLLLKESLLEDFKGYLGCQALSEMIQFYLEEVMPQAENQDPDIKAHVNSLGENLKTLRLRLRRCHRFLPCENKSKAVEQVKNAFNKLQEKGIYKAMSEFDIFINYIEAYMTMKIRN

SEQ ID NO: 231 - protein, 166 aa, Unknown
  Description of Unknown: IL-10 cytokine sequence
SPGQGTQSENSCTHFPGNLPNMLRDLRDAFSRVKTFFQMKDQLDNLLLKESLLEDFKGYLGCQALSEMIQFYLEEVMPQAENQDPDIKAHVNSLGENLKTLRLRLRRCHRFLPCENGGGSGGKSKAVEQVKNAFNKLQEKGIYKAMSEFDIFINYIEAYMTMKIRN

SEQ ID NO: 232 - protein, 114 aa, Unknown
  Description of Unknown: IL-15 cytokine sequence
NWVNVISDLKKIEDLIQSMHIDATLYTESDVHPSCKVTAMKCFLLELQVISLASGDASIHDTVENLIILANNSLSSNGAVTESGCKECEELEEKNIKEFLQSFVHIVQMFINTS

SEQ ID NO: 233 - protein, 10 aa, Artificial Sequence
  Description of Artificial Sequence: Synthetic peptide
FGGGTKVEIK

SEQ ID NO: 234 - protein, 8 aa, Artificial Sequence
  Description of Artificial Sequence: Synthetic peptide
RGEGAMDY

SEQ ID NO: 235 - protein, 10 aa, Artificial Sequence
  Description of Artificial Sequence: Synthetic peptide
RASSSVNYIY

SEQ ID NO: 236 - protein, 7 aa, Artificial Sequence
  Description of Artificial Sequence: Synthetic peptide
YTSNLAP

SEQ ID NO: 237 - protein, 9 aa, Artificial Sequence
  Description of Artificial Sequence: Synthetic peptide
QQFTSSPFT

SEQ ID NO: 238 - protein, 106 aa, Artificial Sequence
  Description of Artificial Sequence: Synthetic polypeptide
DNQLTQSPSFLSASVGDRVTITCRASSSVNYIYWYQQKPGKAPKLLIYYTSNLAPGVPSRFSGSGSGNEYTLTISSLQPEDFATYYCQQFTSSPFTFGQGTKLEIK

SEQ ID NO: 239 - protein, 106 aa, Artificial Sequence
  Description of Artificial Sequence: Synthetic polypeptide
DNQLTQSPSSLSASVGDRVTITCRASSSVNYIYWYQQKPGKAPKLLIYYTSNLAPGVPSRFSGSGSGNDYTLTISSLQPEDFATYYCQQFTSSPFTFGQGTKLEIK

SEQ ID NO: 240 - protein, 106 aa, Artificial Sequence
  Description of Artificial Sequence: Synthetic polypeptide
ENVLTQSPATLSVSPGERATLSCRASSSVNYIYWYQQKPGQAPRLLIYYTSNLAPGIPARFSGSGSGNEYTLTISSLQSEDFAVYYCQQFTSSPFTFGQGTKLEIK

SEQ ID NO: 241 - protein, 105 aa, Artificial Sequence
  Description of Artificial Sequence: Synthetic polypeptide
QNVLTQPPSASGTPGQRVTISCRASSSVNYIYWYQQLPGTAPKLLIYYTSNLAPGVPDRFSGSGSGNSYSLAISGLRSEDEADYYCQQFTSSPFTFGTGTKVTVL

SEQ ID NO: 242 - protein, 105 aa, Artificial Sequence
  Description of Artificial Sequence: Synthetic polypeptide
SNELTQPPSVSVSPGQTARITCRASSSVNYIYWYQQKSGQAPVLVIYYTSNLAPGIPERFSGSGSGNMYTLTISGAQVEDEADYYCQQFTSSPFTFGTGTKVTVL

SEQ ID NO: 243 - DNA, 351 bp, Artificial Sequence
  Description of Artificial Sequence: Synthetic polynucleotide
gaggtgcagctggttgaatctggcggaggattggttcagcctggcggctctctgagactgtcttgtgccgcttctggcttcaccttctccaacttcggcatgcactgggtccgacaggcccctggaaaaggactggaatgggtgtcctacatctcctccggctcctccaccatctactacgctgacaccctgaagggcagattcaccatctctcgggacaacgccaagaactccctgtacctgcagatgaacagcctgagagccgaggacaccgccgtgtactactgtgctagaagaggcgagggcgccatggattattggggccagggaaccacagtgaccgtgtctagc

SEQ ID NO: 244 - DNA, 351 bp, Artificial Sequence
  Description of Artificial Sequence: Synthetic polynucleotide
gaggtgcagctggttgaatctggcggaggattggttcagcctggcggctctctgagactgtcttgtgccgcttctggcttcaccttctccaacttcggcatgcactgggtccgacaggcccctggaaaaggactggaatgggtgtcctacatctcctccggctcctccaccatctactacgctgacaccctgaagggcagattcaccatcagccgggacaactccaagaacaccctgtacctgcagatgaactccctgagagccgaggacaccgccgtgtactactgtgctagaagaggcgagggcgccatggattattggggccagggaaccacagtgaccgtgtctagc

SEQ ID NO: 245 - DNA, 351 bp, Artificial Sequence
  Description of Artificial Sequence: Synthetic polynucleotide
caggtgcagctggtggaatctggtggcggagttgtgcagcctggcagatccctgagactgtcttgtgccgcctctggcttcaccttctccaacttcggcatgcactgggtccgacaggcccctggaaaaggattggagtgggtcgcctacatctcctccggctcctccaccatctactacgctgacaccctgaagggcagattcaccatcagccgggacaactccaagaacaccctgtacctgcagatgaactccctgagagccgaggacaccgccgtgtactactgtgctagaagaggcgagggcgccatggattattggggccagggaaccacagtgaccgtgtctagc

SEQ ID NO: 246 - DNA, 318 bp, Artificial Sequence
  Description of Artificial Sequence: Synthetic polynucleotide
gataaccagctgacccagtctcctagcttcctgtctgcctctgtgggcgacagagtgacaattacctgccgggcctcctcctccgtgaactacatctactggtatcagcagaagcccggcaaggcccctaagctgctgatctactacacctccaatctggcccctggcgtgccctctagattttccggatctggctccggcaacgagtataccctgacaatctccagcctgcagcctgaggacttcgccacctactactgccagcagttcacctcctctccattcacctttggccagggcaccaagctggaaatcaaa

SEQ ID NO: 247 - DNA, 317 bp, Artificial Sequence
  Description of Artificial Sequence: Synthetic polynucleotide
ataaccagctgacccagtctccttccagcctgtctgcttctgtgggcgacagagtgacaattacctgccgggcctcctcctccgtgaactacatctactggtatcagcagaagcccggcaaggcccctaagctgctgatctactacacctccaatctggcccctggcgtgccctctagattttccggatctggctccggcaacgactataccctgacaatctccagcctgcagcctgaggacttcgccacctactactgccagcagttcacctcctctccattcacctttggccagggcaccaagctggaaatcaaa

SEQ ID NO: 248 - DNA, 318 bp, Artificial Sequence
  Description of Artificial Sequence: Synthetic polynucleotide
gagaatgtgctgacccagtctcctgccacactgtctgttagccctggcgagagagctaccctgagctgcagagcctcttcctccgtgaactacatctactggtatcagcagaagcccggccaggctcctagactgctgatctactacacctccaatctggcccctggcatccctgccagattttccggatctggctccggcaacgagtataccctgaccatctccagcctgcagtccgaggactttgctgtgtactattgccagcagttcacaagcagccctttcacctttggccagggcaccaagctggaaatcaaa

SEQ ID NO: 249 - DNA, 315 bp, Artificial Sequence
  Description of Artificial Sequence: Synthetic polynucleotide
cagaatgtgctgacccaacctccttccgcctctggcacacctggacagagagtgacaatctcctgccgggcctcctcctccgtgaactacatctactggtatcagcagctgcccggcaccgctcctaaactgctgatctactacacctccaatctggcccctggcgtgcccgatagattttccggatctggctccggcaactcctacagcctggctatctctggcctgagatctgaggacgaggccgactactactgccagcagttcacctcctctccattcacctttggcaccggcaccaaagtgacagttctt

SEQ ID NO: 250 - DNA, 315 bp, Artificial Sequence
  Description of Artificial Sequence: Synthetic polynucleotide
tctaatgagctgacccagcctccttccgtgtccgtgtctcctggacagaccgccagaattacctgccgggcctcctcctccgtgaactacatctactggtatcagcagaagtccggccaggctcctgtgctcgtgatctactacacctccaatctggcccctggcatccctgagagattctccggatctggctccggcaacatgtacaccctgaccatctctggcgcccaggtggaagatgaggccgactactactgccagcagttcacctcctctccattcacctttggcaccggcaccaaagtgacagttctt

SEQ ID NO: 251 - protein, 107 aa, Homo sapiens [sequence omitted]

SEQ ID NO: 252 - protein, 330 aa, Artificial Sequence
  Description of Artificial Sequence: Synthetic polypeptide
ASTKGPSVFPLAPSSKSTSGGTAALGCLVKDYFPEPVTVSWNSGALTSGVHTFPAVLQSSGLYSLSSVVTVPSSSLGTQTYICNVNHKPSNTKVDKRVEPKSCDKTHTCPPCPAPELLGGPSVFLFPPKPKDTLMISRTPEVTCVVVDVSHEDPEVKFNWYVDGVEVHNAKTKPREEQYASTYRVVSVLTVLHQDWLNGKEYKCKVSNKALPAPIEKTISKAKGQPREPQVYTLPPSREEMTKNQVSLTCLVKGFYPSDIAVEWESNGQPENNYKTTPPVLDSDGSFFLYSKLTVDKSRWQQGNVFSCSVMHEALHNHYTQKSLSLSPGK

SEQ ID NO: 253 - DNA, 344 bp, Homo sapiens
atgagcatcggcctcctgtgctgtgcagccttgtctctcctgtgggcaggtccagtgaatgctggtgtcactcagaccccaaaattccaggtcctgaagacaggacagagcatgacactgcagtgtgcccaggatatgaaccatgaatacatgtcctggtatcgacaagacccaggcatggggctgaggctgattcattactcagttggtgctggtatcactgaccaaggagaagtccccaatggctacaatgtctccagatcaaccacagaggatttcccgctcaggctgctgtcggctgctccctcccagacatctgtgtacttctgtgccagcagttactc

SEQ ID NO: 254 - protein, 114 aa, Homo sapiens
MSIGLLCCAALSLLWAGPVNAGVTQTPKFQVLKTGQSMTLQCAQDMNHEYMSWYRQDPGMGLRLIHYSVGAGITDQGEVPNGYNVSRSTTEDFPLRLLSAAPSQTSVYFCASSY

SEQ ID NO: 255 - protein, 5 aa, Artificial Sequence
  Description of Artificial Sequence: Synthetic peptide
TYYIH

SEQ ID NO: 256 - protein, 6 aa, Artificial Sequence
  Description of Artificial Sequence: Synthetic peptide
SSGSST

SEQ ID NO: 257 - protein, 340 aa, Homo sapiens
ASPTSPKVFPLSLDSTPQDGNVVVACLVQGFFPQEPLSVTWSESGQNVTARNFPPSQDASGDLYTTSSQLTLPATQCPDGKSVTCHVKHYTNSSQDVTVPCRVPPPPPCCHPRLSLHRPALEDLLLGSEANLTCTLTGLRDASGATFTWTPSSGKSAVQGPPERDLCGCYSVSSVLPGCAQPWNHGETFTCTAAHPELKTPLTANITKSGNTFRPEVHLLPPPSEELALNELVTLTCLARGFSPKDVLVRWLQGSQELPREKYLTWASRQEPSQGTTTYAVTSILRVAAEDWKKGETFSCMVGHEALPLAFTQKTIDRMAGKPTHINVSVVMAEADGTCY

SEQ ID NO: 258 - protein, 159 aa, Homo sapiens
MKNHLLFWGVLAVFIKAVHVKAQEDERIVLVDNKCKCARITSRIIRSSEDPNEDIVERNIRIIVPLNNRENISDPTSPLRTRFVYHLSDLCKKCDPTEVELDNQIVTATQSNICDEDSATETCYTYDRNKCYTAVVPLVYGGETKMVETALTPDACYPD

SEQ ID NO: 259 - protein, 107 aa, Artificial Sequence
  Description of Artificial Sequence: Synthetic polypeptide
  MOD_RES (30)..(30): G, E, A, or D
  MOD_RES (31)..(31): N or D
  MOD_RES (32)..(32): R or K
  MOD_RES (36)..(36): Y or H
  MOD_RES (56)..(56): K or S
DIQMTQSPSFLSASVGDRVTITCKASQNVXXXVAWXQQKPGKAPKALIYSSSHRYXGVPSRFSGSGSGTEFTLTISSLQPEDFATYFCQQFKSYPLTFGQGTKLEIK

SEQ ID NO: 260 - protein, 119 aa, Artificial Sequence
  Description of Artificial Sequence: Synthetic polypeptide
  MOD_RES (27)..(27): H, T, G, or Y
  MOD_RES (28)..(28): D, T, or S
  MOD_RES (30)..(30): H, R, D, K, or T
  MOD_RES (31)..(31): L, D, K, T, or N
  MOD_RES (32)..(32): W, F, T, I, Y, or G
  MOD_RES (50)..(50): R or W
  MOD_RES (51)..(51): V, I, or F
  MOD_RES (52)..(52): F, S, or Y
  MOD_RES (53)..(53): A or P
  MOD_RES (57)..(57): N or S
  MOD_RES (58)..(58): T, V, Y, or I
  MOD_RES (59)..(59): K or R
  MOD_RES (98)..(98): G or V
  MOD_RES (100)..(100): Y or I
  MOD_RES (103)..(103): Y or A
  MOD_RES (104)..(104): D or G
QVQLVQSGAEVKKPGSSVKVSCKASGXXFXXXYIHWVRQAPGQGLEWMGXXXXGSGXXXYNEKFKGRVTITADTSTSTAYMELSSLRSEDTAVYYCAXSXYSXXVLDYWGQGTTVTVSS

SEQ ID NO: 261 - protein, 107 aa, Artificial Sequence
  Description of Artificial Sequence: Synthetic polypeptide
DIQMTQTTSSLSASLGDRVTISCSASQGISNYLNWYQQKPDGTVKLLIYYTSSLHSGVPSRFSGSGSGTDYSLTISNLEPEDIATYYCQQYSKLPRTFGGGTKVEIK

SEQ ID NO: 262 - protein, 120 aa, Artificial Sequence
  Description of Artificial Sequence: Synthetic polypeptide
QVQLKESGPGLVAPSQSLSITCTVSGFSLTAYGVNWVRQPPGKGLEWLGMIWGDGNTDYNSALKSRLSISKDNSKSQVFLKMNSLQTDDTARYYCARDRVTATLYAMDYWGQGTSVTVSS

SEQ ID NO: 263 - protein, 15 aa, Artificial Sequence
  Description of Artificial Sequence: Synthetic peptide
RASKSVSILGTHLIH

SEQ ID NO: 264 - protein, 111 aa, Artificial Sequence
  Description of Artificial Sequence: Synthetic polypeptide
DIVLTQSPASLAVSLGQRATISCRASESVDSYGNSFMHWYQQKPGQPPKLLIYRASNLESGIPARFSGSGSRTDFTLTINPVEADDVATYYCQQSNEDPYTFGGGTKLEIK

SEQ ID NO: 265 - protein, 6 aa, Artificial Sequence
  Description of Artificial Sequence: Synthetic peptide
SSSVSY

SEQ ID NO: 266 - protein, 243 aa, Artificial Sequence
  Description of Artificial Sequence: Synthetic polypeptide
EVQLVESGGGLVQPGGSLRLSCAASGFTFSNFGMHWVRQAPGKGLEWVSYISSGSSTIYYADTLKGRFTISRDNSKNTLYLQMNSLRAEDTAVYYCARRGEGAMDYWGQGTTVTVSSGGGGSGGGGSGGGGSGGGGSDNQLTQSPSFLSASVGDRVTITCRASSSVNYIYWYQQKPGKAPKLLIYYTSNLAPGVPSRFSGSGSGNEYTLTISSLQPEDFATYYCQQFTSSPFTFGQGTKLEIK

SEQ ID NO: 267 - protein, 367 aa, Artificial Sequence
  Description of Artificial Sequence: Synthetic polypeptide
QVQLVQSGAEVKKPGSSVKVSCKASGHDFRLTYIHWVRQAPGQGLEWMGRISAGSGNVKYNEKFKGRVTITADTSTSTAYMELSSLRSEDTAVYYCAVSYYSYDVLDYWGQGTTVTVSSGGGGSGGGGSGGGGSGGGGSDIQMTQSPSFLSASVGDRVTITCKASQNVADRVAWYQQKPGKAPKALIYSSSHRYKGVPSRFSGSGSGTEFTLTISSLQPEDFATYFCQQFKSYPLTFGQGTKLEIKGGGGSQVQLVQSGAEVKKPGSSVKVSCKASGYTFTDYNMHWVRQAPGQGLEWIGYIYPYNGGTGYNQKFKSKATITADESTNTAYMELSSLRSEDTAVYYCARGRPAMDYWGQGTLVTVSS

SEQ ID NO: 268 - protein, 111 aa, Artificial Sequence
  Description of Artificial Sequence: Synthetic polypeptide
DIQMTQSPSSLSASVGDRVTITCRASESVDNYGISFMNWFQQKPGKAPKLLIYAASNQGSGVPSRFSGSGSGTDFTLTISSLQPDDFATYYCQQSKEVPWTFGQGTKVEIK

SEQ ID NO: 269 - protein, 367 aa, Artificial Sequence
  Description of Artificial Sequence: Synthetic polypeptide
QVQLVQSGAEVKKPGSSVKVSCKASGTDFKLTYIHWVRQAPGQGLEWMGRIFPGSGNVKYNEKFKGRVTITADTSTSTAYMELSSLRSEDTAVYYCAGSYYSYDVLDYWGQGTTVTVSSGGGGSGGGGSGGGGSGGGGSDIQMTQSPSFLSASVGDRVTITCKASQNVDNRVAWYQQKPGKAPKALIYSSSHRYKGVPSRFSGSGSGTEFTLTISSLQPEDFATYFCQQFKSYPLTFGQGTKLEIKGGGGSQVQLVQSGAEVKKPGSSVKVSCKASGYTFTDYNMHWVRQAPGQGLEWIGYIYPYNGGTGYNQKFKSKATITADESTNTAYMELSSLRSEDTAVYYCARGRPAMDYWGQGTLVTVSS

SEQ ID NO: 270 - protein, 367 aa, Artificial Sequence
  Description of Artificial Sequence: Synthetic polypeptide
QVQLVQSGAEVKKPGSSVKVSCKASGHDFHLWYIHWVRQAPGQGLEWMGRVSAGSGNVKYNEKFKGRVTITADTSTSTAYMELSSLRSEDTAVYYCAGSYYSYDVLDYWGQGTTVTVSSGGGGSGGGGSGGGGSGGGGSDIQMTQSPSFLSASVGDRVTITCKASQNVDNKVAWHQQKPGKAPKALIYSSSHRYKGVPSRFSGSGSGTEFTLTISSLQPEDFATYFCQQFKSYPLTFGQGTKLEIKGGGGSQVQLVQSGAEVKKPGSSVKVSCKASGYTFTDYNMHWVRQAPGQGLEWIGYIYPYNGGTGYNQKFKSKATITADESTNTAYMELSSLRSEDTAVYYCARGRPAMDYWGQGTLVTVSS

SEQ ID NO: 271 - protein, 367 aa, Artificial Sequence
  Description of Artificial Sequence: Synthetic polypeptide
QVQLVQSGAEVKKPGSSVKVSCKASGYSFTTYYIHWVRQAPGQGLEWMGWFFPGSGNIKYNEKFKGRVTITADTSTSTAYMELSSLRSEDTAVYYCAGSYYSYDVLDYWGQGTTVTVSSGGGGSGGGGSGGGGSGGGGSDIQMTQSPSFLSASVGDRVTITCKASQNVGINVVWHQQKPGKAPKALIYSSSHRYSGVPSRFSGSGSGTEFTLTISSLQPEDFATYFCQQFKSYPLTFGQGTKLEIKGGGGSQVQLVQSGAEVKKPGSSVKVSCKASGYTFTDYNMHWVRQAPGQGLEWIGYIYPYNGGTGYNQKFKSKATITADESTNTAYMELSSLRSEDTAVYYCARGRPAMDYWGQGTLVTVSS

SEQ ID NO: 272 - protein, 364 aa, Artificial Sequence
  Description of Artificial Sequence: Synthetic polypeptide
QVQLVESGGGVVQPGRSLRLSCAASGFTFSNFGMHWVRQAPGKGLEWVAYISSGSSTIYYADTLKGRFTISRDNSKNTLYLQMNSLRAEDTAVYYCARRGEGAMDYWGQGTTVTVSSGGGGSGGGGSGGGGSGGGGSDNQLTQSPSFLSASVGDRVTITCRASSSVNYIYWYQQKPGKAPKLLIYYTSNLAPGVPSRFSGSGSGNEYTLTISSLQPEDFATYYCQQFTSSPFTFGQGTKLEIKGGGGSQVQLVQSGAEVKKPGSSVKVSCKASGYTFTDYNMHWVRQAPGQGLEWIGYIYPYNGGTGYNQKFKSKATITADESTNTAYMELSSLRSEDTAVYYCARGRPAMDYWGQGTLVTVSS

SEQ ID NO: 273 - protein, 363 aa, Artificial Sequence
  Description of Artificial Sequence: Synthetic polypeptide
DIQMTQSPSSLSASVGDRVTITCRASESVDNYGISFMNWFQQKPGKAPKLLIYAASNQGSGVPSRFSGSGSGTDFTLTISSLQPDDFATYYCQQSKEVPWTFGQGTKVEIKRTVAAPSVFIFPPSDEQLKSGTASVVCLLNNFYPREAKVQWKVDNALQSGNSQESVTEQDSKDSTYSLSSTLTLSKADYEKHKVYACEVTHQGLSSPVTKSFNRGECGGGGSGGGGSGGGGSAPTSSSTQLQLEHLLLDLQMILNGINNYKNPKLTRMLTAKFAMPKKATELKHLQCLEEELKPLEEVLNLAQSKNFHLRPRDLISNINVIVLELKGSETTFMCEYADETATIVEFLNRWITFCQSIISTLT

SEQ ID NO: 274 - protein, 446 aa, Artificial Sequence
  Description of Artificial Sequence: Synthetic polypeptide
QVQLVQSGAEVKKPGSSVKVSCKASGYTFTDYNMHWVRQAPGQGLEWIGYIYPYNGGTGYNQKFKSKATITADESTNTAYMELSSLRSEDTAVYYCARGRPAMDYWGQGTLVTVSSASTKGPSVFPLAPSSKSTSGGTAALGCLVKDYFPEPVTVSWNSGALTSGVHTFPAVLQSSGLYSLSSVVTVPSSSLGTQTYICNVNHKPSNTKVDKRVEPKSCDKTHTCPPCPAPELLGGPSVFLFPPKPKDTLMISRTPEVTCVVVDVSHEDPEVKFNWYVDGVEVHNAKTKPREEQYASTYRVVSVLTVLHQDWLNGKEYKCKVSNKALPAPIEKTISKAKGQPREPQVCTLPPSREEMTKNQVSLSCAVKGFYPSDIAVEWESNGQPENNYKTTPPVLDSDGSFFLVSKLTVDKSRWQQGNVFSCSVMHEALHNHYTQKSLSLSPGK

SEQ ID NO: 275 - protein, 478 aa, Artificial Sequence
  Description of Artificial Sequence: Synthetic polypeptide
EIQLLESGGGLVQPGGSLRLSCAVSGFSITTTGYHWNWVRQAPGKGLEWVGYIYSSGSTSYNPSLKSRFTISRDTSKNTFYLQMNSLRAEDTAVYYCARGDWHYFDYWGQGTMVTVSSGGGGSGGGGSGGGGSGGGGSDSVTTQSPLSLPVTLGQPASISCSGEKLSDKYVHWYQQRPGQSPRMLIYENDRRPSGVPDRFSGSNSGNDATLKISRVEAEDVGVYFCQFWDSTNSAVFGGGTKVEIKGGGGSDKTHTCPPCPAPELLGGPSVFLFPPKPKDTLMISRTPEVTCVVVDVSHEDPEVKFNWYVDGVEVHNAKTKPREEQYASTYRVVSVLTVLHQDWLNGKEYKCKVSNKALPAPIEKTISKAKGQPREPQVYTLPPCREEMTKNQVSLWCLVKGFYPSDIAVEWESNGQPENNYKTTPPVLDSDGSFFLYSKLTVDKSRWQQGNVFSCSVMHEALHNRFTQKSLSLSPGK

SEQ ID NO: 276 - protein, 366 aa, Artificial Sequence
  Description of Artificial Sequence: Synthetic polypeptide
DIQMTQSPSSLSASVGDRVTITCRASESVDNYGISFMNWFQQKPGKAPKLLIYAASNQGSGVPSRFSGSGSGTDFTLTISSLQPDDFATYYCQQSKEVPWTFGQGTKVEIKRTVAAPSVFIFPPSDEQLKSGTASVVCLLNNFYPREAKVQWKVDNALQSGNSQESVTEQDSKDSTYSLSSTLTLSKADYEKHKVYACEVTHQGLSSPVTKSFNRGECGGGGSGGGGSGGGGSAPTSSSTKKTQLQLEHLLLDLQMILNGINNYKNPKLTRMLTAKFAMPKKATELKHLQCLEEELKPLEEVLNLAQSKNFHLRPRDLISNINVIVLELKGSETTFMCEYADETATIVEFLNRWITFCQSIISTLT

SEQ ID NO: 277 - protein, 446 aa, Artificial Sequence
  Description of Artificial Sequence: Synthetic polypeptide
QVQLVQSGAEVKKPGSSVKVSCKASGYTFTDYNMHWVRQAPGQGLEWIGYIYPYNGGTGYNQKFKSKATITADESTNTAYMELSSLRSEDTAVYYCARGRPAMDYWGQGTLVTVSSASTKGPSVFPLAPSSKSTSGGTAALGCLVKDYFPEPVTVSWNSGALTSGVHTFPAVLQSSGLYSLSSVVTVPSSSLGTQTYICNVNHKPSNTKVDKRVEPKSCDKTHTCPPCPAPELLGGPSVFLFPPKPKDTLMISRTPEVTCVVVDVSHEDPEVKFNWYVDGVEVHNAKTKPREEQYNSTYRVVSVLTVLHQDWLNGKEYKCKVSNKALPAPIEKTISKAKGQPREPQVCTLPPSREEMTKNQVSLSCAVKGFYPSDIAVEWESNGQPENNYKTTPPVLDSDGSFFLVSKLTVDKSRWQQGNVFSCSVMHEALHNHYTQKSLSLSPGK

SEQ ID NO: 278 - protein, 478 aa, Artificial Sequence
  Description of Artificial Sequence: Synthetic polypeptide
EIQLLESGGGLVQPGGSLRLSCAVSGFSITTTGYHWNWVRQAPGKGLEWVGYIYSSGSTSYNPSLKSRFTISRDTSKNTFYLQMNSLRAEDTAVYYCARGDWHYFDYWGQGTMVTVSSGGGGSGGGGSGGGGSGGGGSDSVTTQSPLSLPVTLGQPASISCSGEKLSDKYVHWYQQRPGQSPRMLIYENDRRPSGVPDRFSGSNSGNDATLKISRVEAEDVGVYFCQFWDSTNSAVFGGGTKVEIKGGGGSDKTHTCPPCPAPELLGGPSVFLFPPKPKDTLMISRTPEVTCVVVDVSHEDPEVKFNWYVDGVEVHNAKTKPREEQYNSTYRVVSVLTVLHQDWLNGKEYKCKVSNKALPAPIEKTISKAKGQPREPQVYTLPPCREEMTKNQVSLWCLVKGFYPSDIAVEWESNGQPENNYKTTPPVLDSDGSFFLYSKLTVDKSRWQQGNVFSCSVMHEALHNRFTQKSLSLSPGK

SEQ ID NO: 279 - protein, 446 aa, Artificial Sequence
  Description of Artificial Sequence: Synthetic polypeptide
QVQLVQSGAEVKKPGSSVKVSCKASGYTFTDYNMHWVRQAPGQGLEWIGYIYPYNGGTGYNQKFKSKATITADESTNTAYMELSSLRSEDTAVYYCARGRPAMDYWGQGTLVTVSSASTKGPSVFPLAPSSKSTSGGTAALGCLVKDYFPEPVTVSWNSGALTSGVHTFPAVLQSSGLYSLSSVVTVPSSSLGTQTYICNVNHKPSNTKVDKRVEPKSCDKTHTCPPCPAPELLGGPSVFLFPPKPKDTLMISRTPEVTCVVVDVSHEDPEVKFNWYVDGVEVHNAKTKPREEQYASTYRVVSVLTVLHQDWLNGKEYKCKVSNKALPAPIEKTISKAKGQPREPQVYTLPPCREEMTKNQVSLWCLVKGFYPSDIAVEWESNGQPENNYKTTPPVLDSDGSFFLYSKLTVDKSRWQQGNVFSCSVMHEALHNHYTQKSLSLSPGK

SEQ ID NO: 280 - protein, 218 aa, Artificial Sequence
  Description of Artificial Sequence: Synthetic polypeptide
DIQMTQSPSSLSASVGDRVTITCRASESVDNYGISFMNWFQQKPGKAPKLLIYAASNQGSGVPSRFSGSGSGTDFTLTISSLQPDDFATYYCQQSKEVPWTFGQGTKVEIKRTVAAPSVFIFPPSDEQLKSGTASVVCLLNNFYPREAKVQWKVDNALQSGNSQESVTEQDSKDSTYSLSSTLTLSKADYEKHKVYACEVTHQGLSSPVTKSFNRGEC

SEQ ID NO: 281 - protein, 626 aa, Artificial Sequence
  Description of Artificial Sequence: Synthetic polypeptide
APTSSSTKKTQLQLEHLLLDLQMILNGINNYKNPKLTRMLTAKFAMPKKATELKHLQCLEEELKPLEEVLNLAQSKNFHLRPRDLISNINVIVLELKGSETTFMCEYADETATIVEFLNRWITFCQSIISTLTGGGGSGGGGSGGGGSEIQLLESGGGLVQPGGSLRLSCAVSGFSITTTGYHWNWVRQAPGKGLEWVGYIYSSGSTSYNPSLKSRFTISRDTSKNTFYLQMNSLRAEDTAVYYCARGDWHYFDYWGQGTMVTVSSGGGGSGGGGSGGGGSGGGGSDSVTTQSPLSLPVTLGQPASISCSGEKLSDKYVHWYQQRPGQSPRMLIYENDRRPSGVPDRFSGSNSGNDATLKISRVEAEDVGVYFCQFWDSTNSAVFGGGTKVEIKGGGGSDKTHTCPPCPAPELLGGPSVFLFPPKPKDTLMISRTPEVTCVVVDVSHEDPEVKFNWYVDGVEVHNAKTKPREEQYASTYRVVSVLTVLHQDWLNGKEYKCKVSNKALPAPIEKTISKAKGQPREPQVCTLPPSREEMTKNQVSLSCAVKGFYPSDIAVEWESNGQPENNYKTTPPVLDSDGSFFLVSKLTVDKSRWQQGNVFSCSVMHEALHNHYTQKSLSLSPGK

SEQ ID NO: 282 - protein, 626 aa, Artificial Sequence
  Description of Artificial Sequence: Synthetic polypeptide
EIQLLESGGGLVQPGGSLRLSCAVSGFSITTTGYHWNWVRQAPGKGLEWVGYIYSSGSTSYNPSLKSRFTISRDTSKNTFYLQMNSLRAEDTAVYYCARGDWHYFDYWGQGTMVTVSSGGGGSGGGGSGGGGSGGGGSDSVTTQSPLSLPVTLGQPASISCSGEKLSDKYVHWYQQRPGQSPRMLIYENDRRPSGVPDRFSGSNSGNDATLKISRVEAEDVGVYFCQFWDSTNSAVFGGGTKVEIKGGGGSGGGGSGGGGSAPTSSSTKKTQLQLEHLLLDLQMILNGINNYKNPKLTRMLTAKFAMPKKATELKHLQCLEEELKPLEEVLNLAQSKNFHLRPRDLISNINVIVLELKGSETTFMCEYADETATIVEFLNRWITFCQSIISTLTGGGGSDKTHTCPPCPAPELLGGPSVFLFPPKPKDTLMISRTPEVTCVVVDVSHEDPEVKFNWYVDGVEVHNAKTKPREEQYASTYRVVSVLTVLHQDWLNGKEYKCKVSNKALPAPIEKTISKAKGQPREPQVCTLPPSREEMTKNQVSLSCAVKGFYPSDIAVEWESNGQPENNYKTTPPVLDSDGSFFLVSKLTVDKSRWQQGNVFSCSVMHEALHNHYTQKSLSLSPGK

SEQ ID NO: 283 - protein, 626 aa, Artificial Sequence
  Description of Artificial Sequence: Synthetic polypeptide
EIQLLESGGGLVQPGGSLRLSCAVSGFSITTTGYHWNWVRQAPGKGLEWVGYIYSSGSTSYNPSLKSRFTISRDTSKNTFYLQMNSLRAEDTAVYYCARGDWHYFDYWGQGTMVTVSSGGGGSGGGGSGGGGSGGGGSDSVTTQSPLSLPVTLGQPASISCSGEKLSDKYVHWYQQRPGQSPRMLIYENDRRPSGVPDRFSGSNSGNDATLKISRVEAEDVGVYFCQFWDSTNSAVFGGGTKVEIKGGGGSDKTHTCPPCPAPELLGGPSVFLFPPKPKDTLMISRTPEVTCVVVDVSHEDPEVKFNWYVDGVEVHNAKTKPREEQYASTYRVVSVLTVLHQDWLNGKEYKCKVSNKALPAPIEKTISKAKGQPREPQVCTLPPSREEMTKNQVSLSCAVKGFYPSDIAVEWESNGQPENNYKTTPPVLDSDGSFFLVSKLTVDKSRWQQGNVFSCSVMHEALHNHYTQKSLSLSPGKGGGGSGGGGSGGGGSAPTSSSTKKTQLQLEHLLLDLQMILNGINNYKNPKLTRMLTAKFAMPKKATELKHLQCLEEELKPLEEVLNLAQSKNFHLRPRDLISNINVIVLELKGSETTFMCEYADETATIVEFLNRWITFCQSIISTLT

SEQ ID NO: 284 - protein, 7 aa, Artificial Sequence
  Description of Artificial Sequence: Synthetic peptide
TTGYHWN

SEQ ID NO: 285 - protein, 30 aa, Artificial Sequence
  Description of Artificial Sequence: Synthetic polypeptide
EIQLLESGGGLVQPGGSLRLSCAVSGFSIT

SEQ ID NO: 286 - protein, 10 aa, Artificial Sequence
  Description of Artificial Sequence: Synthetic peptide
FGGGTKVEIK

SEQ ID NO: 287 - protein, 118 aa, Artificial Sequence
  Description of Artificial Sequence: Synthetic polypeptide
EIQLLESGGGLVQPGGSLRLSCAVSGFSITTTGYHWNWVRQAPGKGLEWVGYIYSSGSTSYAPSLKSRFTISRDTSKNTFYLQMNSLRAEDTAVYYCARGDWHYFDYWGQGTMVTVSS

SEQ ID NO: 288 - protein, 108 aa, Artificial Sequence
  Description of Artificial Sequence: Synthetic polypeptide
DSVTTQSPLSLPVTLGQPASISCSGEKLSDKYVHWYQQRPGQSPRMLIYENDRRPSGVPDRFSGSNSGNDATLKISRVEAEDVGVYFCQFWDSTASAVFGGGTKVEIK

SEQ ID NO: 289 - protein, 108 aa, Artificial Sequence
  Description of Artificial Sequence: Synthetic polypeptide
DSVTTQSPLSLPVTLGQPASISCSGEKLSDKYVHWYQQRPGQSPRMLIYENDRRPSGVPDRFSGSNSGNDATLKISRVEAEDVGVYFCQFWASTNSAVFGGGTKVEIK

SEQ ID NO: 290 - protein, 107 aa, Artificial Sequence
  Description of Artificial Sequence: Synthetic polypeptide
SSETTQPPSVSVSPGQTASITCSGEKLSDKYVHWYQQKPGQSPVMVIYENDRRPSGIPERFSGSNSGNTATLTISGTQAMDEADYFCQFWASTNSAVFGGGTQLTVL

SEQ ID NO: 291 - protein, 107 aa, Artificial Sequence
  Description of Artificial Sequence: Synthetic polypeptide
SSETTQPPSVSVSPGQTASITCSGEKLSDKYVHWYQQKPGQSPVMVIYENDRRPSGIPERFSGSNSGNTATLTISGTQAMDEADYFCQFWDSTASAVFGGGTQLTVL

SEQ ID NO: 292 - protein, 108 aa, Artificial Sequence
  Description of Artificial Sequence: Synthetic polypeptide
DSVTTQSPLSLPVTLGQPASISCSGEKLSDKYVHWYQQRPGQSPRMLIYENDRRPSGVPDRFSGSNSGNDATLKISRVEAEDVGVYFCQFWASTASAVFGGGTKVEIK

SEQ ID NO: 293 - protein, 107 aa, Artificial Sequence
  Description of Artificial Sequence: Synthetic polypeptide
SSETTQPPSVSVSPGQTASITCSGEKLSDKYVHWYQQKPGQSPVMVIYENDRRPSGIPERFSGSNSGNTATLTISGTQAMDEADYFCQFWASTASAVFGGGTQLTVL

SEQ ID NO: 294 - protein, 246 aa, Artificial Sequence
  Description of Artificial Sequence: Synthetic polypeptide
EIQLLESGGGLVQPGGSLRLSCAVSGFSITTTGYHWNWVRQAPGKGLEWVGYIYSSGSTSYNPSLKSRFTISRDTSKNTFYLQMNSLRAEDTAVYYCARGDWHYFDYWGQGTMVTVSSGGGGSGGGGSGGGGSGGGGSDSVTTQSPLSLPVTLGQPASISCSGEKLSDKYVHWYQQRPGQSPRMLIYENDRRPSGVPDRFSGSNSGNDATLKISRVEAEDVGVYFCQFWDSTASAVFGGGTKVEIK

SEQ ID NO: 295 - protein, 28 aa, Artificial Sequence
  Description of Artificial Sequence: Synthetic peptide
EIQLLESGGGLVQPGGSLRLSCAVSGFS

SEQ ID NO: 296 - protein, 246 aa, Artificial Sequence
  Description of Artificial Sequence: Synthetic polypeptide
EIQLLESGGGLVQPGGSLRLSCAVSGFSITTTGYHWNWVRQAPGKGLEWVGYIYSSGSTSYNPSLKSRFTISRDTSKNTFYLQMNSLRAEDTAVYYCARGDWHYFDYWGQGTMVTVSSGGGGSGGGGSGGGGSGGGGSDSVTTQSPLSLPVTLGQPASISCSGEKLSDKYVHWYQQRPGQSPRMLIYENDRRPSGVPDRFSGSNSGNDATLKISRVEAEDVGVYFCQFWASTNSAVFGGGTKVEIK

SEQ ID NO: 297 - protein, 9 aa, Artificial Sequence
  Description of Artificial Sequence: Synthetic peptide
ITTTGYHWN

SEQ ID NO: 298 - protein, 245 aa, Artificial Sequence
  Description of Artificial Sequence: Synthetic polypeptide
EIQLLESGGGLVQPGGSLRLSCAVSGFSITTTGYHWNWVRQAPGKGLEWVGYIYSSGSTSYNPSLKSRFTISRDTSKNTFYLQMNSLRAEDTAVYYCARGDWHYFDYWGQGTMVTVSSGGGGSGGGGSGGGGSGGGGSSSETTQPPSVSVSPGQTASITCSGEKLSDKYVHWYQQKPGQSPVMVIYENDRRPSGIPERFSGSNSGNTATLTISGTQAMDEADYFCQFWASTNSAVFGGGTQLTVL

SEQ ID NO: 299 - protein, 245 aa, Artificial Sequence
  Description of Artificial Sequence: Synthetic polypeptide
EIQLLESGGGLVQPGGSLRLSCAVSGFSITTTGYHWNWVRQAPGKGLEWVGYIYSSGSTSYNPSLKSRFTISRDTSKNTFYLQMNSLRAEDTAVYYCARGDWHYFDYWGQGTMVTVSSGGGGSGGGGSGGGGSGGGGSSSETTQPPSVSVSPGQTASITCSGEKLSDKYVHWYQQKPGQSPVMVIYENDRRPSGIPERFSGSNSGNTATLTISGTQAMDEADYFCQFWDSTASAVFGGGTQLTVL

SEQ ID NO: 300 - protein, 246 aa, Artificial Sequence
  Description of Artificial Sequence: Synthetic polypeptide
EIQLLESGGGLVQPGGSLRLSCAVSGFSITTTGYHWNWVRQAPGKGLEWVGYIYSSGSTSYAPSLKSRFTISRDTSKNTFYLQMNSLRAEDTAVYYCARGDWHYFDYWGQGTMVTVSSGGGGSGGGGSGGGGSGGGGSDSVTTQSPLSLPVTLGQPASISCSGEKLSDKYVHWYQQRPGQSPRMLIYENDRRPSGVPDRFSGSNSGNDATLKISRVEAEDVGVYFCQFWDSTNSAVFGGGTKVEIK

SEQ ID NO: 301 - protein, 245 aa, Artificial Sequence
  Description of Artificial Sequence: Synthetic polypeptide
EIQLLESGGGLVQPGGSLRLSCAVSGFSITTTGYHWNWVRQAPGKGLEWVGYIYSSGSTSYAPSLKSRFTISRDTSKNTFYLQMNSLRAEDTAVYYCARGDWHYFDYWGQGTMVTVSSGGGGSGGGGSGGGGSGGGGSSSETTQPPSVSVSPGQTASITCSGEKLSDKYVHWYQQKPGQSPVMVIYENDRRPSGIPERFSGSNSGNTATLTISGTQAMDEADYFCQFWDSTNSAVFGGGTQLTVL

SEQ ID NO: 302 - protein, 246 aa, Artificial Sequence
  Description of Artificial Sequence: Synthetic polypeptide
EIQLLESGGGLVQPGGSLRLSCAVSGFSITTTGYHWNWVRQAPGKGLEWVGYIYSSGSTSYAPSLKSRFTISRDTSKNTFYLQMNSLRAEDTAVYYCARGDWHYFDYWGQGTMVTVSSGGGGSGGGGSGGGGSGGGGSDSVTTQSPLSLPVTLGQPASISCSGEKLSDKYVHWYQQRPGQSPRMLIYENDRRPSGVPDRFSGSNSGNDATLKISRVEAEDVGVYFCQFWASTASAVFGGGTKVEIK

SEQ ID NO: 303 - protein, 245 aa, Artificial Sequence
  Description of Artificial Sequence: Synthetic polypeptide
EIQLLESGGGLVQPGGSLRLSCAVSGFSITTTGYHWNWVRQAPGKGLEWVGYIYSSGSTSYAPSLKSRFTISRDTSKNTFYLQMNSLRAEDTAVYYCARGDWHYFDYWGQGTMVTVSSGGGGSGGGGSGGGGSGGGGSSSETTQPPSVSVSPGQTASITCSGEKLSDKYVHWYQQKPGQSPVMVIYENDRRPSGIPERFSGSNSGNTATLTISGTQAMDEADYFCQFWASTASAVFGGGTQLTVL

SEQ ID NO: 304 - protein, 10 aa, Artificial Sequence
  Description of Artificial Sequence: Synthetic peptide
QFWDSTASAV

SEQ ID NO: 305 - protein, 10 aa, Artificial Sequence
  Description of Artificial Sequence: Synthetic peptide
QFWASTNSAV

SEQ ID NO: 306 - protein, 16 aa, Artificial Sequence
  Description of Artificial Sequence: Synthetic peptide
YIYSSGSTSYAPSLKS

SEQ ID NO: 307 - protein, 10 aa, Artificial Sequence
  Description of Artificial Sequence: Synthetic peptide
QFWASTASAV

SEQ ID NO: 308 - protein, 117 aa, Artificial Sequence
  Description of Artificial Sequence: Synthetic polypeptide
QVQLVESGGGVVQPGRSLRLSCAASGFTFSNFGMHWVRQAPGKGLEWVAYISSGSSTIYYADTLKGRFTISRDNSKNTLYLQMNSLRAEDTAVYYCARRGEGAMDYWGQGTTVTVSS

SEQ ID NO: 309 - protein, 117 aa, Artificial Sequence
  Description of Artificial Sequence: Synthetic polypeptide
EVQLVESGGGLVQPGGSLRLSCAASGFTFSNFGMHWVRQAPGKGLEWVSYISSGSSTIYYADTLKGRFTISRDNSKNTLYLQMNSLRAEDTAVYYCARRGEGAMDYWGQGTTVTVSS

SEQ ID NO: 310 - protein, 27 aa, Artificial Sequence
  Description of Artificial Sequence: Synthetic peptide
  SITE (2)..(26): This region may encompass 2-5 "Glu Ala Ala Ala Lys" repeating units
AEAAAKEAAAKEAAAKEAAAKEAAAKA

SEQ ID NO: 311 - protein, 111 aa, Artificial Sequence
  Description of Artificial Sequence: Synthetic polypeptide
DIVLTQSPASLAVSLGQRATISCRASESVDSSGNSFMHWYQQKPGQPPQLLIYRASNLESGIPARFSGSGSRTDFTLTINPVEADDVATFYCQQSFDDPFTFGSGTKLEIK

SEQ ID NO: 312 - protein, 111 aa, Artificial Sequence
  Description of Artificial Sequence: Synthetic polypeptide
DIVLTQSPDSLAVSLGERATINCRASESVDSSGNSFMHWYQQKPGQPPQLLIYRASNLESGVPDRFSGSGSRTDFTLTISSLQAEDVAVYYCQQSFDDPFTFGQGTKLEIK

SEQ ID NO: 313 - protein, 111 aa, Artificial Sequence
  Description of Artificial Sequence: Synthetic polypeptide
EIVLTQSPATLSLSPGERATLSCRASESVDSSGNSFMHWYQQKPGQAPQLLIYRASNLESGIPARFSGSGSRTDFTLTISSLEPEDFAVYYCQQSFDDPFTFGQGTKLEIK

SEQ ID NO: 314 - protein, 111 aa, Artificial Sequence
  Description of Artificial Sequence: Synthetic polypeptide
EIVLTQSPATLSLSPGERATLSCRASESVDSSGNSFMHWYQQKPGQAPQLLIYRASNLESGIPARFSGSGSRTDFTLTISRLEPEDFAVYYCQQSFDDPFTFGQGTKLEIK

SEQ ID NO: 315 - protein, 111 aa, Artificial Sequence
  Description of Artificial Sequence: Synthetic polypeptide
EIVLTQSPATLSLSPGERATLSCRASESVDSSGNSFMHWYQQKPGQAPQLLIYRASNLESGIPARFSGSGSRTDFTLTISSLQPEDFAVYYCQQSFDDPFTFGQGTKLEIK

SEQ ID NO: 316 - protein, 111 aa, Artificial Sequence
  Description of Artificial Sequence: Synthetic polypeptide
DIQLTQSPSSLSASVGDRVTITCRASESVDSSGNSFMHWYQQKPGQAPQLLIYRASNLESGVPSRFSGSGSRTDFTLTISSLQPEDVATYYCQQSFDDPFTFGQGTKLEIK

SEQ ID NO: 317 - protein, 111 aa, Artificial Sequence
  Description of Artificial Sequence: Synthetic polypeptide
EIVLTQSPATLSLSPGERATLSCRASESVDSSGNSFMHWYQQKPGQAPQLLIYRASNLESGIPARFSGSGPRTDFTLTISSLEPEDFAVYYCQQSFDDPFTFGQGTKLEIK

SEQ ID NO: 318 - protein, 111 aa, Artificial Sequence
  Description of Artificial Sequence: Synthetic polypeptide
EIVLTQSPATLSLSPGERATLSCRASESVDSSGNSFMHWYQQKPGQAPQLLIYRASNLESGIPDRFSGSGSRTDFTLTISRLEPEDFAVYYCQQSFDDPFTFGQGTKLEIK

SEQ ID NO: 319 - protein, 111 aa, Artificial Sequence
  Description of Artificial Sequence: Synthetic polypeptide
DIQLTQSPSSLSASVGDRVTITCRASESVDSSGNSFMHWYQQKPGKVPQLLIYRASNLESGVPSRFSGSGSRTDFTLTISSLQPEDVATYYCQQSFDDPFTFGQGTKLEIK

SEQ ID NO: 320 - protein, 111 aa, Artificial Sequence
  Description of Artificial Sequence: Synthetic polypeptide
DIQLTQSPSSLSASVGDRVTITCRASESVDSSGNSFMHWYQQKPGKTPQLLIYRASNLESGIPSRFSGSGSRTDFTLTIRSLQPEDFATYYCQQSFDDPFTFGQGTKLEIK

SEQ ID NO: 321 - protein, 111 aa, Artificial Sequence
  Description of Artificial Sequence: Synthetic polypeptide
EIVLTQSPGTLSLSPGERATLSCRASESVDSSGNSFMHWYQQKPGQAPQLLIYRASNLESGIPDRFSGSGSRTDFTLTISRLEPEDFAVYYCQQSFDDPFTFGQGTKLEIK

SEQ ID NO: 322 - protein, 111 aa, Artificial Sequence
  Description of Artificial Sequence: Synthetic polypeptide
EIVLTQSPATLSLSPGERATLSCRASESVDSSGNSFMHWYQQKPGLAPQLLIYRASNLESGIPDRFSGSGSRTDFTLTISRLEPEDFAVYYCQQSFDDPFTFGQGTKLEIK

SEQ ID NO: 323 - protein, 111 aa, Artificial Sequence
  Description of Artificial Sequence: Synthetic polypeptide
DIQLTQSPSSLSASVGDRVTITCRASESVDSSGNSFMHWYQQKPGKAPQLLIYRASNLESGVPSRFSGSGSRTDFTLTISSLQPEDFATYYCQQSFDDPFTFGQGTKLEIK

SEQ ID NO: 324 - protein, 111 aa, Artificial Sequence
  Description of Artificial Sequence: Synthetic polypeptide
DIQLTQSPSSVSASVGDRVTITCRASESVDSSGNSFMHWYQQKPGKAPQLLIYRASNLESGVPSRFSGSGSRTDFTLTISSLQPEDFATYYCQQSFDDPFTFGQGTKLEIK

SEQ ID NO: 325 - protein, 111 aa, Artificial Sequence
  Description of Artificial Sequence: Synthetic polypeptide
AIQLTQSPSSLSASVGDRVTITCRASESVDSSGNSFMHWYQQKPGKAPQLLIYRASNLESGVPSRFSGSGSRTDFTLTISSLQPEDFATYYCQQSFDDPFTFGQGTKLEIK

SEQ ID NO: 326 - protein, 111 aa, Artificial Sequence
  Description of Artificial Sequence: Synthetic polypeptide
DIQLTQSPSFLSASVGDRVTITCRASESVDSSGNSFMHWYQQKPGKAPQLLIYRASNLESGVPSRFSGSGSRTEFTLTISSLQPEDFATYYCQQSFDDPFTFGQGTKLEIK

SEQ ID NO: 327 - protein, 111 aa, Artificial Sequence
  Description of Artificial Sequence: Synthetic polypeptide
DIQLTQSPSSLSASVGDRVTITCRASESVDSSGNSFMHWYQQKPGKAPQLLIYRASNLESGVPSRFSGSGSRTDFTFTISSLQPEDIATYYCQQSFDDPFTFGQGTKLEIK

SEQ ID NO: 328 - protein, 111 aa, Artificial Sequence
  Description of Artificial Sequence: Synthetic polypeptide
DIQLTQSPSSLSASVGDRVTITCRASESVDSSGNSFMHWYQQKPGKAPQRLIYRASNLESGVPSRFSGSGSRTEFTLTISSLQPEDFATYYCQQSFDDPFTFGQGTKLEIK

SEQ ID NO: 329 - protein, 111 aa, Artificial Sequence
  Description of Artificial Sequence: Synthetic polypeptide
DIVLTQTPLSLSVTPGQPASISCRASESVDSSGNSFMHWYLQKPGQPPQLLIYRASNLESGVPDRFSGSGSRTDFTLKISRVEAEDVGVYYCQQSFDDPFTFGQGTKLEIK

SEQ ID NO: 330 - protein, 111 aa, Artificial Sequence
  Description of Artificial Sequence: Synthetic polypeptide
DIQLTQSPSSLSASVGDRVTITCRASESVDSSGNSFMHWYQQKPEKAPQSLIYRASNLESGVPSRFSGSGSRTDFTLTISSLQPEDFATYYCQQSFDDPFTFGQGTKLEIK

SEQ ID NO: 331 - protein, 111 aa, Artificial Sequence
  Description of Artificial Sequence: Synthetic polypeptide
EIVLTQSPPTLSLSPGERVTLSCRASESVDSSGNSFMHWYQQKPGQAPQLLIYRASNLESGIPARFSGSGSRTDFTLTISSLQPEDFAVYYCQQSFDDPFTFGQGTKLEIK

SEQ ID NO: 332 - protein, 111 aa, Artificial Sequence
  Description of Artificial Sequence: Synthetic polypeptide
DIQLTQSPSAMSASVGDRVTITCRASESVDSSGNSFMHWYQQKPGKVPQRLIYRASNLESGVPSRFSGSGSRTEFTLTISSLQPEDFATYYCQQSFDDPFTFGQGTKLEIK

SEQ ID NO: 333 - protein, 111 aa, Artificial Sequence
  Description of Artificial Sequence: Synthetic polypeptide
DIVLTQSPLSLPVTPGEPASISCRASESVDSSGNSFMHWYLQKPGQSPQLLIYRASNLESGVPDRFSGSGSRTDFTLKISRVEAEDVGVYYCQQSFDDPFTFGQGTKLEIK

SEQ ID NO: 334 - protein, 111 aa, Artificial Sequence
  Description of Artificial Sequence: Synthetic polypeptide
DIVLTQTPLSLPVTPGEPASISCRASESVDSSGNSFMHWYLQKPGQSPQLLIYRASNLESGVPDRFSGSGSRTDFTLKISRVEAEDVGVYYCQQSFDDPFTFGQGTKLEIK

SEQ ID NO: 335 - protein, 111 aa, Artificial Sequence
  Description of Artificial Sequence: Synthetic polypeptide
DIVLTQTPLSLSVTPGQPASISCRASESVDSSGNSFMHWYLQKPGQSPQLLIYRASNLESGVPDRFSGSGSRTDFTLKISRVEAEDVGVYYCQQSFDDPFTFGQGTKLEIK

SEQ ID NO: 336 - protein, 111 aa, Artificial Sequence
  Description of Artificial Sequence: Synthetic polypeptide
EIVLTQSPPTLSLSPGERVTLSCRASESVDSSGNSFMHWYQQKPGQAPQLLIYRASNLESSIPARFSGSGSRTDFTLTISSLQPEDFAVYYCQQSFDDPFTFGQGTKLEIK

SEQ ID NO: 337 - protein, 111 aa, Artificial Sequence
  Description of Artificial Sequence: Synthetic polypeptide
DIVLTQSPLSLPVTLGQPASISCRASESVDSSGNSFMHWYQQRPGQSPQRLIYRASNLESGVPDRFSGSGSRTDFTLKISRVEAEDVGVYYCQQSFDDPFTFGQGTKLEIK

SEQ ID NO: 338 - protein, 107 aa, Artificial Sequence
  Description of Artificial Sequence: Synthetic polypeptide
EIVLTQSPDFQSVTPKEKVTITCSVSSSVSYMHWYQQKPDQSPKLLIYDTSKLASGVPSRFSGSGSGTDYTLTINSLEAEDAATYYCQQWSSNPQYTFGQGTKLEIK

SEQ ID NO: 339 - protein, 107 aa, Artificial Sequence
  Description of Artificial Sequence: Synthetic polypeptide
AIRLTQSPFSLSASVGDRVTITCSVSSSVSYMHWYQQKPAKAPKLFIYDTSKLASGVPSRFSGSGSGTDYTLTISSLQPEDFATYYCQQWSSNPQYTFGQGTKLEIK

SEQ ID NO: 340 - protein, 107 aa, Artificial Sequence
  Description of Artificial Sequence: Synthetic polypeptide
DIQLTQSPSSLSASVGDRVTITCSVSSSVSYMHWYQQKPGKAPKLLIYDTSKLASGVPSRFSGSGSGTDYTFTISSLQPEDIATYYCQQWSSNPQYTFGQGTKLEIK

SEQ ID NO: 341 - protein, 107 aa, Artificial Sequence
  Description of Artificial Sequence: Synthetic polypeptide
EIVLTQSPATLSLSPGERATLSCSVSSSVSYMHWYQQKPGQAPKLLIYDTSKLASGIPARFSGSGSGTDYTLTISSLEPEDFAVYYCQQWSSNPQYTFGQGTKLEIK

SEQ ID NO: 342 - protein, 107 aa, Artificial Sequence
  Description of Artificial Sequence: Synthetic polypeptide
DIQLTQSPSTLSASVGDRVTITCSVSSSVSYMHWYQQKPGKAPKLLIYDTSKLASGVPSRFSGSGSGTEYTLTISSLQPDDFATYYCQQWSSNPQYTFGQGTKLEIK

SEQ ID NO: 343 - protein, 107 aa, Artificial Sequence
  Description of Artificial Sequence: Synthetic polypeptide
DIQLTQSPSSLSASVGDRVTITCSVSSSVSYMHWYQQKPGKTPKLLIYDTSKLASGIPSRFSGSGSGTDYTLTIRSLQPEDFATYYCQQWSSNPQYTFGQGTKLEIK

SEQ ID NO: 344 - protein, 107 aa, Artificial Sequence
  Description of Artificial Sequence: Synthetic polypeptide
EIVLTQSPPTLSLSPGERVTLSCSVSSSVSYMHWYQQKPGQAPKLLIYDTSKLASGIPARFSGSGSGTDYTLTISSLQPEDFAVYYCQQWSSNPQYTFGQGTKLEIK

SEQ ID NO: 345 - protein, 107 aa, Artificial Sequence
  Description of Artificial Sequence: Synthetic polypeptide
DIQLTQSPSSLSASVGDRVTITCSVSSSVSYMHWYQQKPGKAPKRLIYDTSKLASGVPSRFSGSGSGTEYTLTISSLQPEDFATYYCQQWSSNPQYTFGQGTKLEIK

SEQ ID NO: 346-1099 - skipped (754 entries)

SEQ ID NO: 1100 - protein, 119 aa, Artificial Sequence; identical to SEQ ID NO: 9
  Description of Artificial Sequence: Synthetic polypeptide

SEQ ID NO: 1101 - protein, 106 aa, Artificial Sequence
  Description of Artificial Sequence: Synthetic polypeptide
QSVLTQPPSVSEAPRQRVTISCKASQNVGINVVWHQQLPGKAPKALIYSSSHRYSGVSDRFSGSGSGTSFSLAISGLQSEDEADYFCQQFKSYPLTFGTGTKVTVL

SEQ ID NO: 1102 - protein, 5 aa, Artificial Sequence
  Description of Artificial Sequence: Synthetic peptide
SAYMH

SEQ ID NO: 1103 - protein, 17 aa, Artificial Sequence
  Description of Artificial Sequence: Synthetic peptide
RIDPATGKTKYAPKFQA

SEQ ID NO: 1104 - protein, 10 aa, Artificial Sequence
  Description of Artificial Sequence: Synthetic peptide
SLNWDYGLDY

SEQ ID NO: 1105 - protein, 7 aa, Artificial Sequence
  Description of Artificial Sequence: Synthetic peptide
GFNIKSA

SEQ ID NO: 1106 - protein, 6 aa, Artificial Sequence
  Description of Artificial Sequence: Synthetic peptide
DPATGK

SEQ ID NO: 1107 - protein, 10 aa, Artificial Sequence
  Description of Artificial Sequence: Synthetic peptide
GFNIKSAYMH

SEQ ID NO: 1108 - protein, 7 aa, Artificial Sequence
  Description of Artificial Sequence: Synthetic peptide
AASNLES

SEQ ID NO: 1109 - protein, 9 aa, Artificial Sequence
  Description of Artificial Sequence: Synthetic peptide
QQSIEDPWT

SEQ ID NO: 1110 - protein, 11 aa, Artificial Sequence
  Description of Artificial Sequence: Synthetic peptide
SKSVSILGTHL

SEQ ID NO: 1111 - protein, 111 aa, Artificial Sequence
  Description of Artificial Sequence: Synthetic polypeptide
DIVLTQSPASLAVSLGQRATISCRASKSVSILGTHLIHWYQQKPGQPPKLLIYAASNLESGVPARFSGSGSETVFTLNIHPVEEEDAATYFCQQSIEDPWTFGGGTKLGIK

SEQ ID NO: 1112 - protein, 119 aa, Artificial Sequence
  Description of Artificial Sequence: Synthetic polypeptide
EVQLQQSVADLVRPGASLKLSCTASGFNIKSAYMHWVIQRPDQGPECLGRIDPATGKTKYAPKFQAKATITADTSSNTAYLQLSSLTSEDTAIYYCTRSLNWDYGLDYWGQGTSVTVSS

SEQ ID NO: 1113 - protein, 119 aa, Artificial Sequence
  Description of Artificial Sequence: Synthetic polypeptide
QVQLVQSGAEVKKPGASVKVSCKASGFNIKSAYMHWVRQAPGQGLEWMGRIDPATGKTKYAPKFQARVTMTADTSTNTAYMELSSLRSEDTAVYYCARSLNWDYGLDYWGQGTLVTVSS

SEQ ID NO: 1114 - protein, 119 aa, Artificial Sequence
  Description of Artificial Sequence: Synthetic polypeptide
QVQLVQSGAEVKKPGASVKVSCKASGFNIKSAYMHWVRQAPGQEPGCMGRIDPATGKTKYAPKFQARVTMTADTSINTAYTELSSLRSEDTATYYCARSLNWDYGLDYWGQGTLVTVSS

SEQ ID NO: 1115 - protein, 119 aa, Artificial Sequence
  Description of Artificial Sequence: Synthetic polypeptide
QVQLVQSGAEVKKPGSSVKVSCKASGFNIKSAYMHWVRQAPGQGLEWMGRIDPATGKTKYAPKFQARVTITADTSTNTAYMELSSLRSEDTAVYYCARSLNWDYGLDYWGQGTLVTVSS

SEQ ID NO: 1116 - protein, 119 aa, Artificial Sequence
  Description of Artificial Sequence: Synthetic polypeptide
QVQLVQSGAEVKKPGASVKVSCKASGFNIKSAYMHWVRQAPGQRLEWMGRIDPATGKTKYAPKFQARVTITADTSANTAYMELSSLRSEDTAVYYCARSLNWDYGLDYWGQGTLVTVSS

SEQ ID NO: 1117 - protein, 109 aa, Artificial Sequence
  Description of Artificial Sequence: Synthetic polypeptide
EIVLTQSPATLSLSPGERATLSCRASKSVSILGTHLIHWYQQKPGQAPRLLIYAASNLESGIPARFSGSGSETDFTLTISSLEPEDFAVYFCQQSIEDPFGGGTKVEIK

SEQ ID NO: 1118 - protein, 109 aa, Artificial Sequence
  Description of Artificial Sequence: Synthetic polypeptide
EIVLTQSPATLSLSPGERATLSCRASKSVSILGTHLIHWYQQKPGLAPRLLIYAASNLESGIPDRFSGSGSETDFTLTISRLEPEDFAVYFCQQSIEDPFGGGTKVEIK

SEQ ID NO: 1119 - protein, 109 aa, Artificial Sequence
  Description of Artificial Sequence: Synthetic polypeptide
EIVLTQSPGTLSLSPGERATLSCRASKSVSILGTHLIHWYQQKPGQAPRLLIYAASNLESGIPDRFSGSGSETDFTLTISRLEPEDFAVYFCQQSIEDPFGGGTKVEIK

SEQ ID NO: 1120 - protein, 5 aa, Artificial Sequence
  Description of Artificial Sequence: Synthetic peptide
DTYMY

SEQ ID NO: 1121 - protein, 17 aa, Artificial Sequence
  Description of Artificial Sequence: Synthetic peptide
RIDPANGNTKYDPKFQD

SEQ ID NO: 1122 - protein, 9 aa, Artificial Sequence
  Description of Artificial Sequence: Synthetic peptide
GSYYYAMDY

SEQ ID NO: 1123 - protein, 7 aa, Artificial Sequence
  Description of Artificial Sequence: Synthetic peptide
GFKTEDT

SEQ ID NO: 1124 - protein, 6 aa, Artificial Sequence
  Description of Artificial Sequence: Synthetic peptide
DPANGN

SEQ ID NO: 1125 - protein, 10 aa, Artificial Sequence
  Description of Artificial Sequence: Synthetic peptide
GFKTEDTYMY

SEQ ID NO: 1126 - protein, 15 aa, Artificial Sequence
  Description of Artificial Sequence: Synthetic peptide
RASESVDSYGNSFMH

SEQ ID NO: 1127 - protein, 7 aa, Artificial Sequence
  Description of Artificial Sequence: Synthetic peptide
RASNLES

SEQ ID NO: 1128 - protein, 9 aa, Artificial Sequence
  Description of Artificial Sequence: Synthetic peptide
QQSNEDPYT

SEQ ID NO: 1129 - protein, 11 aa, Artificial Sequence
  Description of Artificial Sequence: Synthetic peptide
SESVDSYGNSF

SEQ ID NO: 1130 - protein, 118 aa, Artificial Sequence
  Description of Artificial Sequence: Synthetic polypeptide
EVQLQQSGAELVKPGASVKLSCTASGFKTEDTYMYWVKQRPEQGLEWIGRIDPANGNTKYDPKFQDKATITADSSSNTAYLQLSSLPSEDTAVYYCARGSYYYAMDYWGQGTSVTVSS

SEQ ID NO: 1131 - protein, 118 aa, Artificial Sequence
  Description of Artificial Sequence: Synthetic polypeptide
QVQLVQSGAEVKKPGSSVKVSCKASGFKTEDTYMYWVRQAPGQGLEWIGRIDPANGNTKYDPKFQDRATITADSSTNTAYMELSSLRSEDTAVYYCARGSYYYAMDYWGQGTLVTVSS

SEQ ID NO: 1132 - protein, 118 aa, Artificial Sequence
  Description of Artificial Sequence: Synthetic polypeptide
QVQLVQSGAEVKKPGASVKVSCKASGFKTEDTYMYWVRQAPGQRLEWIGRIDPANGNTKYDPKFQDRATITADSSANTAYMELSSLRSEDTAVYYCARGSYYYAMDYWGQGTLVTVSS

SEQ ID NO: 1133 - protein, 118 aa, Artificial Sequence
  Description of Artificial Sequence: Synthetic polypeptide
EVQLVESGGGLVQPGGSLKLSCAASGFKTEDTYMYWVRQASGKGLEWIGRIDPANGNTKYDPKFQDRATISADSSKNTAYLQMNSLKTEDTAVYYCARGSYYYAMDYWGQGTLVTVSS

SEQ ID NO: 1134 - protein, 118 aa, Artificial Sequence
  Description of Artificial Sequence: Synthetic polypeptide
EVQLVQSGAEVKKPGESLRISCKASGFKTEDTYMYWVRQMPGKGLEWIGRIDPANGNTKYDPKFQDQATISADSSINTAYLQWSSLKASDTAMYYCARGSYYYAMDYWGQGTLVTVSS

SEQ ID NO: 1135 - protein, 118 aa, Artificial Sequence
  Description of Artificial Sequence: Synthetic polypeptide
QVQLVQSGSELKKPGASVKVSCKASGFKTEDTYMYWVRQAPGQGLEWIGRIDPANGNTKYDPKFQDRAVISADSSVNTAYLQISSLKAEDTAVYYCARGSYYYAMDYWGQGTLVTVSS

SEQ ID NO: 1136 - protein, 111 aa, Artificial Sequence
  Description of Artificial Sequence: Synthetic polypeptide
DIVLTQSPDSLAVSLGERATINCRASESVDSYGNSFMHWYQQKPGQPPKLLIYRASNLESGVPDRFSGSGSRTDFTLTISSLQAEDVAVYYCQQSNEDPYTFGQGTKLEIK

SEQ ID NO: 1137 - protein, 111 aa, Artificial Sequence
  Description of Artificial Sequence: Synthetic polypeptide
EIVLTQSPATLSLSPGERATLSCRASESVDSYGNSFMHWYQQKPGQAPKLLIYRASNLESGIPARFSGSGSRTDFTLTISRLEPEDFAVYYCQQSNEDPYTFGQGTKLEIK

SEQ ID NO: 1138 - protein, 111 aa, Artificial Sequence
  Description of Artificial Sequence: Synthetic polypeptide
DIQLTQSPSSLSASVGDRVTITCRASESVDSYGNSFMHWYQQKPGQAPKLLIYRASNLESGVPSRFSGSGSRTDFTLTISSLQPEDVATYYCQQSNEDPYTFGQGTKLEIK

SEQ ID NO: 1139 - protein, 111 aa, Artificial Sequence
  Description of Artificial Sequence: Synthetic polypeptide
AIQLTQSPSSLSASVGDRVTITCRASESVDSYGNSFMHWYQQKPGKAPKLLIYRASNLESGVPSRFSGSGSRTDFTLTISSLQPEDFATYYCQQSNEDPYTFGQGTKLEIK

SEQ ID NO: 1140 - protein, 111 aa, Artificial Sequence
  Description of Artificial Sequence: Synthetic polypeptide
EIVLTQSPDFQSVTPKEKVTITCRASESVDSYGNSFMHWYQQKPDQSPKLLIYRASNLESGVPSRFSGSGSRTDFTLTINSLEAEDAATYYCQQSNEDPYTFGQGTKLEIK

SEQ ID NO: 1141 - protein, 5 aa, Artificial Sequence
  Description of Artificial Sequence: Synthetic peptide
SYAMS

SEQ ID NO: 1142 - protein, 17 aa, Artificial Sequence
  Description of Artificial Sequence: Synthetic peptide
HISNGGDYIYYADTVKG

SEQ ID NO: 1143 - protein, 12 aa, Artificial Sequence
  Description of Artificial Sequence: Synthetic peptide
PSYYSDPWFFDV

SEQ ID NO: 1144 - protein, 7 aa, Artificial Sequence
  Description of Artificial Sequence: Synthetic peptide
GFTFRSY

SEQ ID NO: 1145 - protein, 6 aa, Artificial Sequence
  Description of Artificial Sequence: Synthetic peptide
SNGGDY

SEQ ID NO: 1146 - protein, 10 aa, Artificial Sequence
  Description of Artificial Sequence: Synthetic peptide
GFTFRSYAMS

SEQ ID NO: 1147 - protein, 10 aa, Artificial Sequence
  Description of Artificial Sequence: Synthetic peptide
SAGSSVSFMH

SEQ ID NO: 1148 - protein, 7 aa, Artificial Sequence
  Description of Artificial Sequence: Synthetic peptide
DTSKLAS

SEQ ID NO: 1149 - protein, 9 aa, Artificial Sequence
  Description of Artificial Sequence: Synthetic peptide
LQGSGFPLT

SEQ ID NO: 1150 - protein, 6 aa, Artificial Sequence
  Description of Artificial Sequence: Synthetic peptide
GSSVSF

SEQ ID NO: 1151 - protein, 106 aa, Artificial Sequence
  Description of Artificial Sequence: Synthetic polypeptide
ENVLTQSPAIMSASPGEKVTMTCSAGSSVSFMHWYQQKSSTSPKLWIYDTSKLASGVPGRFSGSGSGNSFSLTISSMEAEDVAIYYCLQGSGFPLTFGSGTKLEIK

SEQ ID NO: 1152 - protein, 121 aa, Artificial Sequence
  Description of Artificial Sequence: Synthetic polypeptide
DVKLVESGEGLVKPGGSLKLSCAASGFTFRSYAMSWVRQTPEKRLEWVAHISNGGDYIYYADTVKGRFTISRDNARNTLYLQMSSLKSEDTAMYYCTRPSYYSDPWFFDVWGTGTTVTVSS

SEQ ID NO: 1153 - protein, 121 aa, Artificial Sequence
  Description of Artificial Sequence: Synthetic polypeptide
EVQLVESGGGLVQPGGSLRLSCAASGFTFRSYAMSWVRQAPGKGLEWVAHISNGGDYIYYADTVKGRFTISRDNAKNSLYLQMNSLRAEDTAVYYCTRPSYYSDPWFFDVWGQGTTVTVSS

SEQ ID NO: 1154 - protein, 121 aa, Artificial Sequence
  Description of Artificial Sequence: Synthetic polypeptide
QVQLVESGGGVVQPGRSLRLSCAASGFTFRSYAMSWVRQAPGKGLEWVAHISNGGDYIYYADTVKGRFTISRDNSKNTLYLQMSSLRAEDTAVYYCTRPSYYSDPWFFDVWGQGTTVTVSS

SEQ ID NO: 1155 - protein, 121 aa, Artificial Sequence
  Description of Artificial Sequence: Synthetic polypeptide
EVQLVESGGGLVQPGGSLRLSCAASGFTFRSYAMSWVRQAPGKGLEWVAHISNGGDYIYYADTVKGRFTISRDNSKNTLYLQMNSLRAEDTAVYYCTRPSYYSDPWFFDVWGQGTTVTVSS

SEQ ID NO: 1156 - protein, 121 aa, Artificial Sequence
  Description of Artificial Sequence: Synthetic polypeptide
QVQLVQSGSELKKPGASVKVSCKASGFTFRSYAMSWVRQAPGQGLEWVAHISNGGDYIYYADTVKGRFVISRDNSVNTLYLQISSLKAEDTAVYYCTRPSYYSDPWFFDVWGQGTTVTVSS

SEQ ID NO: 1157 - protein, 121 aa, Artificial Sequence
  Description of Artificial Sequence: Synthetic polypeptide
QVQLVQSGAEVKKPGASVKVSCKASGFTFRSYAMSWVRQAPGQRLEWVAHISNGGDYIYYADTVKGRFTITRDNSANTLYMELSSLRSEDTAVYYCTRPSYYSDPWFFDVWGQGTTVTVSS

SEQ ID NO: 1158 - protein, 106 aa, Artificial Sequence
  Description of Artificial Sequence: Synthetic polypeptide
ENVLTQSPATLSLSPGERATLSCSAGSSVSFMHWYQQKPGQAPKLLIYDTSKLASGIPARFSGSGSGNDFTLTISSLEPEDFAVYYCLQGSGFPLTFGQGTKLEIK

SEQ ID NO: 1159 - protein, 106 aa, Artificial Sequence
  Description of Artificial Sequence: Synthetic polypeptide
ENVLTQSPDFQSVTPKEKVTITCSAGSSVSFMHWYQQKPDQSPKLLIYDTSKLASGVPSRFSGSGSGNDFTLTINSLEAEDAATYYCLQGSGFPLTFGQGTKLEIK

SEQ ID NO: 1160 - protein, 106 aa, Artificial Sequence
  Description of Artificial Sequence: Synthetic polypeptide
DNQLTQSPSSLSASVGDRVTITCSAGSSVSFMHWYQQKPGKVPKLLIYDTSKLASGVPSRFSGSGSGNDFTLTISSLQPEDVATYYCLQGSGFPLTFGQGTKLEIK

SEQ ID NO: 1161 - protein, 106 aa, Artificial Sequence
  Description of Artificial Sequence: Synthetic polypeptide
ANQLTQSPSSLSASVGDRVTITCSAGSSVSFMHWYQQKPGKAPKLLIYDTSKLASGVPSRFSGSGSGNDFTLTISSLQPEDFATYYCLQGSGFPLTFGQGTKLEIK

SEQ ID NO: 1162 - protein, 106 aa, Artificial Sequence
  Description of Artificial Sequence: Synthetic polypeptide
DNVLTQSPDSLAVSLGERATINCSAGSSVSFMHWYQQKPGQPPKLLIYDTSKLASGVPDRFSGSGSGNDFTLTISSLQAEDVAVYYCLQGSGFPLTFGQGTKLEIK

SEQ ID NO: 1163 - protein, 5 aa, Artificial Sequence
  Description of Artificial Sequence: Synthetic peptide
DYNIH

SEQ ID NO: 1164 - protein, 17 aa, Artificial Sequence
  Description of Artificial Sequence: Synthetic peptide
YINPYNGRTGYNQKFKA

SEQ ID NO: 1165 - protein, 9 aa, Artificial Sequence
  Description of Artificial Sequence: Synthetic peptide
WDGSSYFDY

SEQ ID NO: 1166 - protein, 10 aa, Artificial Sequence
  Description of Artificial Sequence: Synthetic peptide
GYTFTDYNIH

SEQ ID NO: 1167 - protein, 6 aa, Artificial Sequence
  Description of Artificial Sequence: Synthetic peptide
NPYNGR

SEQ ID NO: 1168 - protein, 10 aa, Artificial Sequence
  Description of Artificial Sequence: Synthetic peptide
SASSSVSYMH

SEQ ID NO: 1169 - protein, 7 aa, Artificial Sequence
  Description of Artificial Sequence: Synthetic peptide
EISKLAS

SEQ ID NO: 1170 - protein, 9 aa, Artificial Sequence
  Description of Artificial Sequence: Synthetic peptide
QQWNYPLLT

SEQ ID NO: 1171 - protein, 106 aa, Artificial Sequence
  Description of Artificial Sequence: Synthetic polypeptide
EIVLTQSPAITAASLGQKVTITCSASSSVSYMHWYQQKSGTSPKPWIYEISKLASGVPARFSGSGSGTSYSLTISSMEAEDAAIYYCQQWNYPLLTFGAGTKLELK

SEQ ID NO: 1172 - protein, 118 aa, Artificial Sequence
  Description of Artificial Sequence: Synthetic polypeptide
EVQLQQSGPVLVKPGASVRMSCKASGYTFTDYNIHWVKQSHGRSLEWVGYINPYNGRTGYNQKFKAKATLTVDKSSSTAYMDLRSLTSEDSAVYYCARWDGSSYFDYWGQGTTLTVSS

SEQ ID NO: 1173 - protein, 118 aa, Artificial Sequence
  Description of Artificial Sequence: Synthetic polypeptide
QVQLVQSGAEVKKPGSSVKVSCKASGYTFTDYNIHWVRQAPGQGLEWVGYINPYNGRTGYNQKFKARATLTVDKSTSTAYMELSSLRSEDTAVYYCARWDGSSYFDYWGQGTTVTVSS

SEQ ID NO: 1174 - protein, 118 aa, Artificial Sequence
  Description of Artificial Sequence: Synthetic polypeptide
QVQLVQSGAEVKKPGASVKVSCKASGYTFTDYNIHWVRQAPGQGLEWVGYINPYNGRTGYNQKFKARATLTVDKSTSTAYMELRSLRSDDMAVYYCARWDGSSYFDYWGQGTTVTVSS

SEQ ID NO: 1175 - protein, 118 aa, Artificial Sequence
  Description of Artificial Sequence: Synthetic polypeptide
QVQLVQSGAEVKKPGASVKVSCKASGYTFTDYNIHWVRQATGQGLEWVGYINPYNGRTGYNQKFKARATLTVNKSISTAYMELSSLRSEDTAVYYCARWDGSSYFDYWGQGTTVTVSS

SEQ ID NO: 1176 - protein, 118 aa, Artificial Sequence
  Description of Artificial Sequence: Synthetic polypeptide
EVQLVESGGGLVQPGRSLRLSCTASGYTFTDYNIHWVRQAPGKGLEWVGYINPYNGRTGYNQKFKARATLSVDKSKSIAYLQMNSLKTEDTAVYYCARWDGSSYFDYWGQGTTVTVSS

SEQ ID NO: 1177 - protein, 118 aa, Artificial Sequence
  Description of Artificial Sequence: Synthetic polypeptide
QVQLVQSGSELKKPGASVKVSCKASGYTFTDYNIHWVRQAPGQGLEWVGYINPYNGRTGYNQKFKARAVLSVDKSVSTAYLQISSLKAEDTAVYYCARWDGSSYFDYWGQGTTVTVSS

SEQ ID NO: 1178 - protein, 106 aa, Artificial Sequence
  Description of Artificial Sequence: Synthetic polypeptide
EIVLTQSPATLSLSPGERATLSCSASSSVSYMHWYQQKPGQAPKLLIYEISKLASGIPARFSGSGSGTDYTLTISSLEPEDFAVYYCQQWNYPLLTFGQGTKLEIK

SEQ ID NO: 1179 - protein, 106 aa, Artificial Sequence
  Description of Artificial Sequence: Synthetic polypeptide
EIVLTQSPATLSLSPGERATLSCSASSSVSYMHWYQQKPGQAPKLLIYEISKLASGIPARFSGSGSGTDYTLTISRLEPEDFAVYYCQQWNYPLLTFGQGTKLEIK

SEQ ID NO: 1180 - protein, 106 aa, Artificial Sequence
  Description of Artificial Sequence: Synthetic polypeptide
EIVLTQSPDFQSVTPKEKVTITCSASSSVSYMHWYQQKPDQSPKLLIYEISKLASGVPSRFSGSGSGTDYTLTINSLEAEDAATYYCQQWNYPLLTFGQGTKLEIK

SEQ ID NO: 1181 - protein, 106 aa, Artificial Sequence
  Description of Artificial Sequence: Synthetic polypeptide
DIQLTQSPSFLSASVGDRVTITCSASSSVSYMHWYQQKPGKAPKLLIYEISKLASGVPSRFSGSGSGTEYTLTISSLQPEDFATYYCQQWNYPLLTFGQGTKLEIK

SEQ ID NO: 1182 - protein, 106 aa, Artificial Sequence
  Description of Artificial Sequence: Synthetic polypeptide
AIQLTQSPSSLSASVGDRVTITCSASSSVSYMHWYQQKPGKAPKLLIYEISKLASGVPSRFSGSGSGTDYTLTISSLQPEDFATYYCQQWNYPLLTFGQGTKLEIK

SEQ ID NO: 1183 - protein, 106 aa, Artificial Sequence
  Description of Artificial Sequence: Synthetic polypeptide
AIRLTQSPFSLSASVGDRVTITCSASSSVSYMHWYQQKPAKAPKLFIYEISKLASGVPSRFSGSGSGTDYTLTISSLQPEDFATYYCQQWNYPLLTFGQGTKLEIK

SEQ ID NO: 1184 - protein, 106 aa, Artificial Sequence
  Description of Artificial Sequence: Synthetic polypeptide
DIVLTQSPDSLAVSLGERATINCSASSSVSYMHWYQQKPGQPPKLLIYEISKLASGVPDRFSGSGSGTDYTLTISSLQAEDVAVYYCQQWNYPLLTFGQGTKLEIK

SEQ ID NO: 1185 - protein, 5 aa, Artificial Sequence
  Description of Artificial Sequence: Synthetic peptide
GSWMN

SEQ ID NO: 1186 - protein, 17 aa, Artificial Sequence
  Description of Artificial Sequence: Synthetic peptide
RIYPGDGDTDYSGKFKG

SEQ ID NO: 1187 - protein, 12 aa, Artificial Sequence
  Description of Artificial Sequence: Synthetic peptide
SGYFNYVPVFDY

SEQ ID NO: 1188 - protein, 7 aa, Artificial Sequence
  Description of Artificial Sequence: Synthetic peptide
GYTFSGS

SEQ ID NO: 1189 - protein, 6 aa, Artificial Sequence
  Description of Artificial Sequence: Synthetic peptide
YPGDGD

SEQ ID NO: 1190 - protein, 10 aa, Artificial Sequence
  Description of Artificial Sequence: Synthetic peptide
GYTFSGSWMN

SEQ ID NO: 1191 - protein, 10 aa, Artificial Sequence
  Description of Artificial Sequence: Synthetic peptide
SANSTVGYIH

SEQ ID NO: 1192 - protein, 7 aa, Artificial Sequence
  Description of Artificial Sequence: Synthetic peptide
TTSNLAS

SEQ ID NO: 1193 - protein, 8 aa, Artificial Sequence
  Description of Artificial Sequence: Synthetic peptide
HQWSFYPT

SEQ ID NO: 1194 - protein, 6 aa, Artificial Sequence
  Description of Artificial Sequence: Synthetic peptide
NSTVGY

SEQ ID NO: 1195 - protein, 105 aa, Artificial Sequence
  Description of Artificial Sequence: Synthetic polypeptide
QIVLTQSPAIMSASLGEEIALTCSANSTVGYIHWYQQKSGTSPKLLIYTTSNLASGVPSRFSGSGSGTFYSLTISSVEAEDAADYFCHQWSFYPTFGGGTKLEIK

SEQ ID NO: 1196 - protein, 121 aa, Artificial Sequence
  Description of Artificial Sequence: Synthetic polypeptide
QIQLQQSGPEVVKPGASVQISCKASGYTFSGSWMNWVKQRPGKGLEWIGRIYPGDGDTDYSGKFKGRATLTADKSSSTAYMRLSSLTSEDSAVYFCARSGYFNYVPVFDYWGQGTTLSVSS

SEQ ID NO: 1197 - protein, 121 aa, Artificial Sequence
  Description of Artificial Sequence: Synthetic polypeptide
QIQLVQSGAEVKKPGASVKVSCKASGYTFSGSWMNWVRQAPGQGLEWIGRIYPGDGDTDYSGKFKGRATLTADKSTSTAYMELSSLRSEDTAVYYCARSGYFNYVPVFDYWGQGTTVTVSS

SEQ ID NO: 1198 - protein, 121 aa, Artificial Sequence
  Description of Artificial Sequence: Synthetic polypeptide
QIQLVQSGAEVKKPGSSVKVSCKASGYTFSGSWMNWVRQAPGQGLEWIGRIYPGDGDTDYSGKFKGRATLTADKSTSTAYMELSSLRSEDTAVYYCARSGYFNYVPVFDYWGQGTTVTVSS

SEQ ID NO: 1199 - protein, 121 aa, Artificial Sequence
  Description of Artificial Sequence: Synthetic polypeptide
EIQLVQSGAEVKKPGESLKISCKASGYTFSGSWMNWVRQMPGKGLEWIGRIYPGDGDTDYSGKFKGQATLSADKSISTAYLQWSSLKASDTAMYYCARSGYFNYVPVFDYWGQGTTVTVSS

SEQ ID NO: 1200 - protein, 121 aa, Artificial Sequence
  Description of Artificial Sequence: Synthetic polypeptide
QIQLVQSGSELKKPGASVKVSCKASGYTFSGSWMNWVRQAPGQGLEWIGRIYPGDGDTDYSGKFKGRAVLSADKSVSTAYLQISSLKAEDTAVYYCARSGYFNYVPVFDYWGQGTTVTVSS

SEQ ID NO: 1201 - protein, 121 aa, Artificial Sequence
  Description of Artificial Sequence: Synthetic polypeptide
QIQLVQSGSELKKPGASVKVSCKASGYTFSGSWMNWVRQAPGQGLEWIGRIYPGDGDTDYSGKFKGRAVLSADKSVSMAYLQISSLKAEDTAVYYCARSGYFNYVPVFDYWGQGTTVTVSS

SEQ ID NO: 1202 - protein, 121 aa, Artificial Sequence
  Description of Artificial Sequence: Synthetic polypeptide
EIQLVESGGGLVQPGRSLRLSCTASGYTFSGSWMNWVRQAPGKGLEWIGRIYPGDGDTDYSGKFKGRATLSADKSKSIAYLQMNSLKTEDTAVYYCARSGYFNYVPVFDYWGQGTTVTVSS

SEQ ID NO: 1203 - protein, 105 aa, Artificial Sequence
  Description of Artificial Sequence: Synthetic polypeptide
EIVLTQSPATLSLSPGERATLSCSANSTVGYIHWYQQKPGQAPKLLIYTTSNLASGIPARFSGSGSGTDYTLTISSLEPEDFAVYFCHQWSFYPTFGQGTKLEIK

SEQ ID NO: 1204 - protein, 105 aa, Artificial Sequence
  Description of Artificial Sequence: Synthetic polypeptide
DIQLTQSPSFLSASVGDRVTITCSANSTVGYIHWYQQKPGKAPKLLIYTTSNLASGVPSRFSGSGSGTEYTLTISSLQPEDFATYFCHQWSFYPTFGQGTKLEIK

SEQ ID NO: 1205 - protein, 105 aa, Artificial Sequence
  Description of Artificial Sequence: Synthetic polypeptide
EIVLTQSPATLSLSPGERATLSCSANSTVGYIHWYQQKPGQAPKLLIYTTSNLASGIPARFSGSGPGTDYTLTISSLEPEDFAVYFCHQWSFYPTFGQGTKLEIK

SEQ ID NO: 1206 - protein, 105 aa, Artificial Sequence
  Description of Artificial Sequence: Synthetic polypeptide
DIVLTQSPDSLAVSLGERATINCSANSTVGYIHWYQQKPGQPPKLLIYTTSNLASGVPDRFSGSGSGTDYTLTISSLQAEDVAVYFCHQWSFYPTFGQGTKLEIK

SEQ ID NO: 1207 - protein, 105 aa, Artificial Sequence
  Description of Artificial Sequence: Synthetic polypeptide
EIVLTQSPDFQSVTPKEKVTITCSANSTVGYIHWYQQKPDQSPKLLIYTTSNLASGVPSRFSGSGSGTDYTLTINSLEAEDAATYFCHQWSFYPTFGQGTKLEIK

SEQ ID NO: 1208 - protein, 5 aa, Artificial Sequence
  Description of Artificial Sequence: Synthetic peptide
DYYMY

SEQ ID NO: 1209 - protein, 17 aa, Artificial Sequence
  Description of Artificial Sequence: Synthetic peptide
TISGGGSYTYSPDSVKG

SEQ ID NO: 1210 - protein, 14 aa, Artificial Sequence
  Description of Artificial Sequence: Synthetic peptide
ERDIYYGNFNAMVY

SEQ ID NO: 1211 - protein, 7 aa, Artificial Sequence
  Description of Artificial Sequence: Synthetic peptide
GFTFSDY

SEQ ID NO: 1212 - protein, 6 aa, Artificial Sequence
  Description of Artificial Sequence: Synthetic peptide
SGGGSY

SEQ ID NO: 1213 - protein, 10 aa, Artificial Sequence
  Description of Artificial Sequence: Synthetic peptide
GFTFSDYYMY

SEQ ID NO: 1214 - protein, 15 aa, Artificial Sequence
  Description of Artificial Sequence: Synthetic peptide
RASKSVSTSGYSYMH

SEQ ID NO: 1215 - protein, 7 aa, Artificial Sequence
  Description of Artificial Sequence: Synthetic peptide
LASNLES

SEQ ID NO: 1216 - protein, 9 aa, Artificial Sequence
  Description of Artificial Sequence: Synthetic peptide
QHSRDLPWT

SEQ ID NO: 1217 - protein, 11 aa, Artificial Sequence
  Description of Artificial Sequence: Synthetic peptide
SKSVSTSGYSY

SEQ ID NO: 1218 - protein, 111 aa, Artificial Sequence
  Description of Artificial Sequence: Synthetic polypeptide
DIVLTQSPVSLTVSLGQRATISCRASKSVSTSGYSYMHWYQQKPGQPPKLLIYLASNLESGVPARFSGSGSGTDFTLNIHPVEEEDAATYYCQHSRDLPWTFGGGTKLEIK

SEQ ID NO: 1219 - protein, 123 aa, Artificial Sequence
  Description of Artificial Sequence: Synthetic polypeptide
EVQLVESGGGLVKPGGSLKLSCAASGFTFSDYYMYWVRQTPEKRLEWVATISGGGSYTYSPDSVKGRFTISRDNAKNNLYLQMSSLRSEDTAMYFCARERDIYYGNFNAMVYWGRGTSVTVSS

SEQ ID NO: 1220 - protein, 123 aa, Artificial Sequence
  Description of Artificial Sequence: Synthetic polypeptide
EVQLLESGGGLVQPGGSLRLSCAASGFTFSDYYMYWVRQAPGKGLEWVATISGGGSYTYSPDSVKGRFTISRDNSKNTLYLQMNSLRAEDTAVYYCARERDIYYGNFNAMVYWGRGTLVTVSS

SEQ ID NO: 1221 - protein, 123 aa, Artificial Sequence
  Description of Artificial Sequence: Synthetic polypeptide
EVQLVESGGGLVQPGGSLRLSCAASGFTFSDYYMYWVRQAPGKGLEWVATISGGGSYTYSPDSVKGRFTISRDNAKNSLYLQMNSLRAEDTAVYYCARERDIYYGNFNAMVYWGRGTLVTVSS

SEQ ID NO: 1222 - protein, 123 aa, Artificial Sequence
  Description of Artificial Sequence: Synthetic polypeptide
QVQLVESGGGVVQPGRSLRLSCAASGFTFSDYYMYWVRQAPGKGLEWVATISGGGSYTYSPDSVKGRFTISRDNSKNTLYLQMNSLRAEDTAVYYCARERDIYYGNFNAMVYWGRGTLVTVSS

SEQ ID NO: 1223 - protein, 123 aa, Artificial Sequence
  Description of Artificial Sequence: Synthetic polypeptide
QVQLVESGGGLVKPGGSLRLSCAASGFTFSDYYMYWIRQAPGKGLEWVATISGGGSYTYSPDSVKGRFTISRDNAKNSLYLQMNSLRAEDTAVYYCARERDIYYGNFNAMVYWGRGTLVTVSS

SEQ ID NO: 1224 - protein, 111 aa, Artificial Sequence
  Description of Artificial Sequence: Synthetic polypeptide
EIVLTQSPGTLSLSPGERATLSCRASKSVSTSGYSYMHWYQQKPGQAPRLLIYLASNLESGIPDRFSGSGSGTDFTLTISRLEPEDFAVYYCQHSRDLPWTFGGGTKVEIK

SEQ ID NO: 1225 - protein, 111 aa, Artificial Sequence
  Description of Artificial Sequence: Synthetic polypeptide
EIVLTQSPATLSLSPGERATLSCRASKSVSTSGYSYMHWYQQKPGQAPRLLIYLASNLESGIPARFSGSGSGTDFTLTISSLEPEDFAVYYCQHSRDLPWTFGGGTKVEIK

SEQ ID NO: 1226 - protein, 111 aa, Artificial Sequence
  Description of Artificial Sequence: Synthetic polypeptide
DIQLTQSPSTLSASVGDRVTITCRASKSVSTSGYSYMHWYQQKPGKAPKLLIYLASNLESGVPSRFSGSGSGTEFTLTISSLQPDDFATYYCQHSRDLPWTFGGGTKVEIK

SEQ ID NO: 1227 - protein, 111 aa, Artificial Sequence
  Description of Artificial Sequence: Synthetic polypeptide
AIQLTQSPSSLSASVGDRVTITCRASKSVSTSGYSYMHWYQQKPGKAPKLLIYLASNLESGVPSRFSGSGSGTDFTLTISSLQPEDFATYYCQHSRDLPWTFGGGTKVEIK

SEQ ID NO: 1228 - skipped

SEQ ID NO: 1229 - protein, 5 aa, Artificial Sequence
  Description of Artificial Sequence: Synthetic peptide
GYFWN

SEQ ID NO: 1230 - protein, 16 aa, Artificial Sequence
  Description of Artificial Sequence: Synthetic peptide
YISYDGSNNYNPSLKN

SEQ ID NO: 1231 - protein, 11 aa, Artificial Sequence
  Description of Artificial Sequence: Synthetic peptide
PSPGTGYAVDY

SEQ ID NO: 1232 - protein, 8 aa, Artificial Sequence
  Description of Artificial Sequence: Synthetic peptide
GYSITSGY

SEQ ID NO: 1233 - protein, 6 aa, Artificial Sequence
  Description of Artificial Sequence: Synthetic peptide
SYDGSN

SEQ ID NO: 1234 - protein, 11 aa, Artificial Sequence
  Description of Artificial Sequence: Synthetic peptide
GYSITSGYFWN

SEQ ID NO: 1235 - protein, 16 aa, Artificial Sequence
  Description of Artificial Sequence: Synthetic peptide
RSSQSLVHSNGNTYLH

SEQ ID NO: 1236 - protein, 7 aa, Artificial Sequence
  Description of Artificial Sequence: Synthetic peptide
KVSNRFS

SEQ ID NO: 1237 - protein, 9 aa, Artificial Sequence
  Description of Artificial Sequence: Synthetic peptide
SQSTHVPFT

SEQ ID NO: 1238 - protein, 12 aa, Artificial Sequence
  Description of Artificial Sequence: Synthetic peptide
SQSLVHSNGNTY

SEQ ID NO: 1239 - protein, 112 aa, Artificial Sequence
  Description of Artificial Sequence: Synthetic polypeptide
NVVMTQTPLSLPVSLGDQASISCRSSQSLVHSNGNTYLHWYLQKPGQSPKFLIYKVSNRFSGVPDRFSGGGSGTEFTLKISRVEAEDLGVYFCSQSTHVPFTFGSGTKLEIK

SEQ ID NO: 1240 - protein, 120 aa, Artificial Sequence
  Description of Artificial Sequence: Synthetic polypeptide
NVQLQESGPGLVKPSQSLSLTCSVAGYSITSGYFWNWIRQFPGNKLEWMGYISYDGSNNYNPSLKNRISITRDTSKNQFFLKLNSVTTEDTATYYCASPSPGTGYAVDYWGQGTSVTVSS

SEQ ID NO: 1241 - protein, 120 aa, Artificial Sequence
  Description of Artificial Sequence: Synthetic polypeptide
QVQLQESGPGLVKPSETLSLTCTVSGYSITSGYFWNWIRQPPGKGLEWIGYISYDGSNNYNPSLKNRVTISRDTSKNQFSLKLSSVTAADTAVYYCASPSPGTGYAVDYWGQGTLVTVSS

SEQ ID NO: 1242 - protein, 120 aa, Artificial Sequence; identical to SEQ ID NO: 1241
  Description of Artificial Sequence: Synthetic polypeptide

SEQ ID NO: 1243 - protein, 120 aa, Artificial Sequence
  Description of Artificial Sequence: Synthetic polypeptide
QVQLVESGGGLVQPGGSLRLSCSVSGYSITSGYFWNWVRQAPGKGLEWVGYISYDGSNNYNPSLKNRFTISRDTSKNTFYLQMNSLRAEDTAVYYCASPSPGTGYAVDYWGQGTLVTVSS

SEQ ID NO: 1244 - protein, 111 aa, Artificial Sequence
  Description of Artificial Sequence: Synthetic polypeptide
VVMTQSPGTLSLSPGERATLSCRSSQSLVHSNGNTYLHWYQQKPGQAPRFLIYKVSNRFSGIPDRFSGSGSGTDFTLTISRLEPEDFAVYFCSQSTHVPFTFGQGTKLEIK

SEQ ID NO: 1245 - protein, 112 aa, Artificial Sequence
  Description of Artificial Sequence: Synthetic polypeptide
EVVMTQSPATLSLSPGERATLSCRSSQSLVHSNGNTYLHWYQQKPGQAPRFLIYKVSNRFSGIPARFSGSGSGTDFTLTISSLEPEDFAVYFCSQSTHVPFTFGQGTKLEIK

SEQ ID NO: 1246 - protein, 112 aa, Artificial Sequence
  Description of Artificial Sequence: Synthetic polypeptide
EVVMTQSPATLSVSPGERATLSCRSSQSLVHSNGNTYLHWYQQKPGQAPRFLIYKVSNRFSGIPARFSGSGSGTEFTLTISSLQSEDFAVYFCSQSTHVPFTFGQGTKLEIK

SEQ ID NO: 1247 - protein, 112 aa, Artificial Sequence
  Description of Artificial Sequence: Synthetic polypeptide
DVQMTQSPSSLSASVGDRVTITCRSSQSLVHSNGNTYLHWYQQKPGKAPKFLIYKVSNRFSGVPSRFSGSGSGTDFTFTISSLQPEDIATYFCSQSTHVPFTFGQGTKLEIK

SEQ ID NO: 1248 - protein, 5 aa, Artificial Sequence
  Description of Artificial Sequence: Synthetic peptide
DYIVH

SEQ ID NO: 1249 - protein, 17 aa, Artificial Sequence
  Description of Artificial Sequence: Synthetic peptide
WINTYTGTPTYADDFEG

SEQ ID NO: 1250 - protein, 13 aa, Artificial Sequence
  Description of Artificial Sequence: Synthetic peptide
SWRRGIRGIGFDY

SEQ ID NO: 1251 - protein, 7 aa, Artificial Sequence
  Description of Artificial Sequence: Synthetic peptide
GYTFTDY

SEQ ID NO: 1252 - protein, 6 aa, Artificial Sequence
  Description of Artificial Sequence: Synthetic peptide
NTYTGT

SEQ ID NO: 1253 - protein, 10 aa, Artificial Sequence
  Description of Artificial Sequence: Synthetic peptide
GYTFTDYIVH

SEQ ID NO: 1254 - protein, 11 aa, Artificial Sequence
  Description of Artificial Sequence: Synthetic peptide
KASKSINKYLA

SEQ ID NO: 1255 - protein, 7 aa, Artificial Sequence
  Description of Artificial Sequence: Synthetic peptide
DGSTLQS

SEQ ID NO: 1256 - protein, 9 aa, Artificial Sequence
  Description of Artificial Sequence: Synthetic peptide
QQHNEYPPT

SEQ ID NO: 1257 - protein, 7 aa, Artificial Sequence
  Description of Artificial Sequence: Synthetic peptide
SKSINKY

SEQ ID NO: 1258 - protein, 107 aa, Artificial Sequence
  Description of Artificial Sequence: Synthetic polypeptide
DVQMTQSPYNLAASPGESVSINCKASKSINKYLAWYQQKPGKPNKLLIYDGSTLQSGIPSRFSGSGSGTDFTLTIRGLEPEDFGLYYCQQHNEYPPTFGAGTKLELK

SEQ ID NO: 1259 - protein, 122 aa, Artificial Sequence
  Description of Artificial Sequence: Synthetic polypeptide
QLQLVQSGPELREPGESVKISCKASGYTFTDYIVHWVKQAPGKGLKWMGWINTYTGTPTYADDFEGRFVFSLEASASTANLQISNLKNEDTATYFCARSWRRGIRGIGFDYWGQGVMVTVSS

SEQ ID NO: 1260 - protein, 122 aa, Artificial Sequence
  Description of Artificial Sequence: Synthetic polypeptide
QLQLVQSGAEVKKPGASVKVSCKASGYTFTDYIVHWVRQAPGQGLEWMGWINTYTGTPTYADDFEGWVTMTLDASISTAYMELSRLRSDDTAVYYCARSWRRGIRGIGFDYWGQGTMVTVSS

SEQ ID NO: 1261 - protein, 122 aa, Artificial Sequence
  Description of Artificial Sequence: Synthetic polypeptide
QLQLVQSGAEVKKPGASVKVSCKASGYTFTDYIVHWVRQAPGQGLEWMGWINTYTGTPTYADDFEGRVTMTLDASTSTAYMELSSLRSEDTAVYYCARSWRRGIRGIGFDYWGQGTMVTVSS

SEQ ID NO: 1262 - protein, 122 aa, Artificial Sequence
  Description of Artificial Sequence: Synthetic polypeptide
QLQLVQSGAEVKKPGASVKVSCKASGYTFTDYIVHWVRQAPGQRLEWMGWINTYTGTPTYADDFEGRVTITLDASASTAYMELSSLRSEDMAVYYCARSWRRGIRGIGFDYWGQGTMVTVSS

SEQ ID NO: 1263 - protein, 122 aa, Artificial Sequence
  Description of Artificial Sequence: Synthetic polypeptide
QLQLVQSGAEVKKPGASVKVSCKASGYTFTDYIVHWVRQATGQGLEWMGWINTYTGTPTYADDFEGRVTMTLNASISTAYMELSSLRSEDTAVYYCARSWRRGIRGIGFDYWGQGTMVTVSS

SEQ ID NO: 1264 - protein, 107 aa, Artificial Sequence
  Description of Artificial Sequence: Synthetic polypeptide
EVVMTQSPGTLSLSPGERATLSCKASKSINKYLAWYQQKPGQAPRLLIYDGSTLQSGIPDRFSGSGSGTDFTLTISRLEPEDFAVYYCQQHNEYPPTFGQGTKLEIK

SEQ ID NO: 1265 - protein, 107 aa, Artificial Sequence
  Description of Artificial Sequence: Synthetic polypeptide
EVVMTQSPATLSLSPGERATLSCKASKSINKYLAWYQQKPGQAPRLLIYDGSTLQSGIPARFSGSGSGTDFTLTISSLEPEDFAVYYCQQHNEYPPTFGQGTKLEIK

SEQ ID NO: 1266 - protein, 107 aa, Artificial Sequence
  Description of Artificial Sequence: Synthetic polypeptide
DVQMTQSPSSLSASVGDRVTITCKASKSINKYLAWYQQKPGKAPKLLIYDGSTLQSGVPSRFSGSGSGTDFTLTISSLQPEDFATYYCQQHNEYPPTFGQGTKLEIK

SEQ ID NO: 1267 - protein, 107 aa, Artificial Sequence
  Description of Artificial Sequence: Synthetic polypeptide
AVRMTQSPSSFSASTGDRVTITCKASKSINKYLAWYQQKPGKAPKLLIYDGSTLQSGVPSRFSGSGSGTDFTLTISCLQSEDFATYYCQQHNEYPPTFGQGTKLEIK

SEQ ID NO: 1268 - protein, 5 aa, Artificial Sequence
  Description of Artificial Sequence: Synthetic peptide
NYGVH

SEQ ID NO: 1269 - protein, 16 aa, Artificial Sequence
  Description of Artificial Sequence: Synthetic peptide
VIWSDGSTDYDTAFIS

SEQ ID NO: 1270 - protein, 9 aa, Artificial Sequence
  Description of Artificial Sequence: Synthetic peptide
RAVVADFDY

SEQ ID NO: 1271 - protein, 6 aa, Artificial Sequence
  Description of Artificial Sequence: Synthetic peptide
GFSLTN

SEQ ID NO: 1272 - protein, 9 aa, Artificial Sequence
  Description of Artificial Sequence: Synthetic peptide
VIWSDGSTD

SEQ ID NO: 1273 - protein, 10 aa, Artificial Sequence
  Description of Artificial Sequence: Synthetic peptide
GFSLTNYGVH

SEQ ID NO: 1274 - protein, 117 aa, Artificial Sequence
  Description of Artificial Sequence: Synthetic polypeptide
QVQLKQSGPGLLQPSQSLSITCTVSGFSLTNYGVHWVRQSPGKGLEWLGVIWSDGSTDYDTAFISRLSISKDNSKSQVFFKLNSLQADDTAIYYCARRAVVADFDYWGQGTTLTVSS

SEQ ID NO: 1275 - protein, 16 aa, Artificial Sequence
  Description of Artificial Sequence: Synthetic peptide
KASKEVTIFGSISALH

SEQ ID NO: 1276 - protein, 7 aa, Artificial Sequence
  Description of Artificial Sequence: Synthetic peptide
NGAKLES

SEQ ID NO: 1277 - protein, 9 aa, Artificial Sequence
  Description of Artificial Sequence: Synthetic peptide
LQNKEVPFT

SEQ ID NO: 1278 - protein, 119 aa, Artificial Sequence
  Description of Artificial Sequence: Synthetic polypeptide
DIVLTQSPASLAVSLGQKATISCKASKEVTIFGSISALHWYQQKPGQPPKLIYNGAKLESGVSARFSDSGSQNRSPFGNQLSFTLTIAPVEADDAATYYCLQNKEVPFTFGSGTKLEIK

SEQ ID NO: 1279 - protein, 117 aa, Artificial Sequence
  Description of Artificial Sequence: Synthetic polypeptide
DIVLTQSPDSLAVSLGERATINCKASKEVTIFGSISALHWYQQKPGQPPKLLYNGAKLESGVSARFGVPDRFSRSGSGLDFTLTISSLQAEDVAVYYCLQNKEVPFTFGQGTKLEIK

SEQ ID NO: 1280 - protein, 117 aa, Artificial Sequence
  Description of Artificial Sequence: Synthetic polypeptide
EIVLTQSPDFQSVTPKEKVTITCKASKEVTIFGSISALHWYQQKPDQSPKLLYNGAKLESGVSARFGVPSRFSRSGSGLDFTLTINSLEAEDAATYYCLQNKEVPFTFGQGTKLEIK

SEQ ID NO: 1281 - protein, 117 aa, Artificial Sequence
  Description of Artificial Sequence: Synthetic polypeptide
AIQLTQSPSSLSASVGDRVTITCKASKEVTIFGSISALHWYQQKPGKAPKLLYNGAKLESGVSARFGVPSRFSRSGSGLDFTLTISSLQPEDFATYYCLQNKEVPFTFGQGTKLEIK

SEQ ID NO: 1282 - protein, 117 aa, Artificial Sequence
  Description of Artificial Sequence: Synthetic polypeptide
DIVLTQTPLSLSVTPGQPASISCKASKEVTIFGSISALHWYLQKPGQPPKLLYNGAKLESGVSARFGVPDRFSRSGSGLDFTLKISRVEAEDVGVYYCLQNKEVPFTFGQGTKLEIK

SEQ ID NO: 1283 - protein, 117 aa, Artificial Sequence
  Description of Artificial Sequence: Synthetic polypeptide
QVTLKESGPVLVKPTETLTLTCTVSGFSLTNYGVHWVRQPPGKALEWLGVIWSDGSTDYDTAFISRLTISKDNSKSQVVLTMTNMDPVDTATYYCARRAVVADFDYWGQGTTVTVSS

SEQ ID NO: 1284 - protein, 117 aa, Artificial Sequence
  Description of Artificial Sequence: Synthetic polypeptide
QVQLQESGPGLVKPSGTLSLTCAVSGFSLTNYGVHWVRQPPGKGLEWLGVIWSDGSTDYDTAFISRLTISKDNSKSQVSLKLSSVTAADTAVYYCARRAVVADFDYWGQGTTVTVSS

SEQ ID NO: 1285 - protein, 117 aa, Artificial Sequence
  Description of Artificial Sequence: Synthetic polypeptide
QVQLQQSGPGLVKPSQTLSLTCAVSGFSLTNYGVHWVRQSPSRGLEWLGVIWSDGSTDYDTAFISRLTINKDNSKSQVSLQLNSVTPEDTAVYYCARRAVVADFDYWGQGTTVTVSS

SEQ ID NO: 1286 - protein, 117 aa, Artificial Sequence
  Description of Artificial Sequence: Synthetic polypeptide
EVQLVESGGGLVQPGPSLRLSCTVSGFSLTNYGVHWVRQAPGKGLEWLGVIWSDGSTDYDTAFISRLTISKDNSKSIVYLQMNSLKTEDTAVYYCARRAVVADFDYWGQGTTVTVSS

SEQ ID NO: 1287 - protein, 117 aa, Artificial Sequence
  Description of Artificial Sequence: Synthetic polypeptide
EVQLVQSGAEVKKPGESLRISCKVSGFSLTNYGVHWVRQMPGKGLEWLGVIWSDGSTDYDTAFISQLTISKDNSISTVYLQWSSLKASDTAMYYCARRAVVADFDYWGQGTTVTVSS

SEQ ID NO: 1288 - protein, 5 aa, Artificial Sequence
  Description of Artificial Sequence: Synthetic peptide
SYGMS

SEQ ID NO: 1289 - protein, 17 aa, Artificial Sequence
  Description of Artificial Sequence: Synthetic peptide
LISSGGSYTYYTDSVKG

SEQ ID NO: 1290 - protein, 8 aa, Artificial Sequence
  Description of Artificial Sequence: Synthetic peptide
HGGNFFDY

SEQ ID NO: 1291 - protein, 7 aa, Artificial Sequence
  Description of Artificial Sequence: Synthetic peptide
GFTFRSY

SEQ ID NO: 1292 - protein, 6 aa, Artificial Sequence
  Description of Artificial Sequence: Synthetic peptide
SSGGSY

SEQ ID NO: 1293 - protein, 10 aa, Artificial Sequence
  Description of Artificial Sequence: Synthetic peptide
GFTFRSYGMS

SEQ ID NO: 1294 - protein, 10 aa, Artificial Sequence
  Description of Artificial Sequence: Synthetic peptide
SVSSSVSYMH

SEQ ID NO: 1295 - protein, 7 aa, Artificial Sequence
  Description of Artificial Sequence: Synthetic peptide
DTSKLAS

SEQ ID NO: 1296 - protein, 10 aa, Artificial Sequence
  Description of Artificial Sequence: Synthetic peptide
QQWSSNPQYT

SEQ ID NO: 1297 - protein, 6 aa, Artificial Sequence
  Description of Artificial Sequence: Synthetic peptide
SSSVSY

SEQ ID NO: 1298 - protein, 5 aa, Artificial Sequence
  Description of Artificial Sequence: Synthetic peptide
SSWMN

SEQ ID NO: 1299 - protein, 17 aa, Artificial Sequence
  Description of Artificial Sequence: Synthetic peptide
RIYPGDGDTKYNGKFKG

SEQ ID NO: 1300 - protein, 10 aa, Artificial Sequence
  Description of Artificial Sequence: Synthetic peptide
RGTGGWYFDV

SEQ ID NO: 1301 - protein, 10 aa, Artificial Sequence
  Description of Artificial Sequence: Synthetic peptide
RGTGGWYFDV

SEQ ID NO: 1302 - protein, 7 aa, Artificial Sequence
  Description of Artificial Sequence: Synthetic peptide
GYAFSSS

SEQ ID NO: 1303 - protein, 6 aa, Artificial Sequence
  Description of Artificial Sequence: Synthetic peptide
YPGDGD

SEQ ID NO: 1304 - protein, 10 aa, Artificial Sequence
  Description of Artificial Sequence: Synthetic peptide
GYAFSSSWMN

SEQ ID NO: 1305 - protein, 15 aa, Artificial Sequence
  Description of Artificial Sequence: Synthetic peptide
RASESVDSSGNSFMH

SEQ ID NO: 1306 - protein, 7 aa, Artificial Sequence
  Description of Artificial Sequence: Synthetic peptide
RASNLES

SEQ ID NO: 1307 - protein, 9 aa, Artificial Sequence
  Description of Artificial Sequence: Synthetic peptide
QQSFDDPFT

SEQ ID NO: 1308 - protein, 11 aa, Artificial Sequence
  Description of Artificial Sequence: Synthetic peptide
SESVDSSGNSF

SEQ ID NO: 1309 - protein, 246 aa, Artificial Sequence
  Description of Artificial Sequence: Synthetic polypeptide
QVQLVQSGAEVKKPGSSVKVSCKASGHDFDKFYIHWVRQAPGQGLEWMGRVSAGSGNVKYNEKFKGRVTITADTSTSTAYMELSSLRSEDTAVYYCAGSYYSYDVLDYWGQGTTVTVSSGGGGSGGGGSGGGGSGGGGSDIQMTQSPSFLSASVGDRVTITCKASQNVGNRVAWYQQKPGKAPKALIYSSSHRYKGVPSRFSGSGSGTEFTLTISSLQPEDFATYFCQQFKSYPLTFGQGTKLEIK

SEQ ID NO: 1310 - protein, 119 aa, Artificial Sequence; identical to SEQ ID NO: 94
  Description of Artificial Sequence: Synthetic polypeptide

SEQ ID NO: 1311 - protein, 119 aa, Artificial Sequence
  Description of Artificial Sequence: Synthetic polypeptide
QVQLVQSGAEVKKPGSSVKVSCKASGTDFKLTYIHWVRQAPGQGLEWMGRIFPGSGNVKYNEKFKGRVTITADTSTSTAYMELSSLRSEDTAVYYCAVSYYSYDVLDYWGQGTTVTVSS

SEQ ID NO: 1312 - protein, 119 aa, Artificial Sequence
  Description of Artificial Sequence: Synthetic polypeptide
QVQLVQSGAEVKKPGSSVKVSCKASGHDFRLTYIHWVRQAPGQGLEWMGRISAGSGNVKYNEKFKGRVTITADTSTSTAYMELSSLRSEDTAVYYCAVSYYSYDVLDYWGQGTTVTVSS

SEQ ID NO: 1313 - protein, 107 aa, Artificial Sequence; identical to SEQ ID NO: 90
  Description of Artificial Sequence: Synthetic polypeptide

SEQ ID NO: 1314 - protein, 107 aa, Artificial Sequence; identical to SEQ ID NO: 141
  Description of Artificial Sequence: Synthetic polypeptide

SEQ ID NO: 1315 - protein, 5 aa, Artificial Sequence
  Description of Artificial Sequence: Synthetic peptide
AYGVN

SEQ ID NO: 1316 - protein, 16 aa, Artificial Sequence
  Description of Artificial Sequence: Synthetic peptide
MIWGDGNTDYNSALKS

SEQ ID NO: 1317 - protein, 12 aa, Artificial Sequence
  Description of Artificial Sequence: Synthetic peptide
DRVTATLYAMDY

SEQ ID NO: 1318 - protein, 7 aa, Artificial Sequence
  Description of Artificial Sequence: Synthetic peptide
GFSLTAY

SEQ ID NO: 1319 - protein, 5 aa, Artificial Sequence
  Description of Artificial Sequence: Synthetic peptide
WGDGN

SEQ ID NO: 1320 - protein, 10 aa, Artificial Sequence
  Description of Artificial Sequence: Synthetic peptide
GFSLTAYGVN

SEQ ID NO: 1321 - protein, 11 aa, Artificial Sequence
  Description of Artificial Sequence: Synthetic peptide
SASQGISNYLN

SEQ ID NO: 1322 - protein, 7 aa, Artificial Sequence
  Description of Artificial Sequence: Synthetic peptide
YTSSLHS

SEQ ID NO: 1323 - protein, 9 aa, Artificial Sequence
  Description of Artificial Sequence: Synthetic peptide
QQYSKLPRT

SEQ ID NO: 1324 - protein, 107 aa, Artificial Sequence
  Description of Artificial Sequence: Synthetic polypeptide
DIQMTQSPSSLSASVGDRVTITCSASQGISNYLNWYQQTPGKAPKLLIYYTSSLHSGVPSRFSGSGSGTDYTFTISSLQPEDIATYYCQQYSKLPRTFGQGTKLQIT

SEQ ID NO: 1325 - protein, 120 aa, Artificial Sequence
  Description of Artificial Sequence: Synthetic polypeptide
QVQLQESGPGLVRPSQTLSLTCTVSGFSLTAYGVNWVRQPPGRGLEWLGMIWGDGNTDYNSALKSRVTMLKDTSKNQFSLRLSSVTAADTAVYYCARDRVTATLYAMDYWGQGSLVTVSS

SEQ ID NO: 1326 - protein, 246 aa, Artificial Sequence
  Description of Artificial Sequence: Synthetic polypeptide
QVQLVQSGAEVKKPGSSVKVSCKASGHDFRLTYIHWVRQAPGQGLEWMGRVSAGSGNTKYNEKFKGRVTITADTSTSTAYMELSSLRSEDTAVYYCAVSYYSYDVLDYWGQGTTVTVSSGGGGSGGGGSGGGGSGGGGSDIQMTQSPSFLSASVGDRVTITCKASQNVGDRVVWHQQKPGKAPKALIYSSSHRYKGVPSRFSGSGSGTEFTLTISSLQPEDFATYFCQQFKSYPLTFGQGTKLEIK

SEQ ID NO: 1327 - protein, 246 aa, Artificial Sequence
  Description of Artificial Sequence: Synthetic polypeptide
QVQLVQSGAEVKKPGSSVKVSCKASGHDFRLTYIHWVRQAPGQGLEWMGRVSAGSGNVKYNEKFKGRVTITADTSTSTAYMELSSLRSEDTAVYYCAVSYYSYDVLDYWGQGTTVTVSSGGGGSGGGGSGGGGSGGGGSDIQMTQSPSFLSASVGDRVTITCKASQNVGNRVVWHQQKPGKAPKALIYSSSHRYKGVPSRFSGSGSGTEFTLTISSLQPEDFATYFCQQFKSYPLTFGQGTKLEIK

SEQ ID NO: 1328 - protein, 246 aa, Artificial Sequence
  Description of Artificial Sequence: Synthetic polypeptide
QVQLVQSGAEVKKPGSSVKVSCKASGHDFRLTYIHWVRQAPGQGLEWMGRIYAGSGNVKYNEKFKGRVTITADTSTSTAYMELSSLRSEDTAVYYCAVSYYSYDVLDYWGQGTTVTVSSGGGGSGGGGSGGGGSGGGGSDIQMTQSPSFLSASVGDRVTITCKASQNVADRVVWHQQKPGKAPKALIYSSSHRYKGVPSRFSGSGSGTEFTLTISSLQPEDFATYFCQQFKSYPLTFGQGTKLEIK

SEQ ID NO: 1329 - protein, 246 aa, Artificial Sequence
  Description of Artificial Sequence: Synthetic polypeptide
QVQLVQSGAEVKKPGSSVKVSCKASGHDFKLTYIHWVRQAPGQGLEWMGRVSAGSGNTKYNEKFKGRVTITADTSTSTAYMELSSLRSEDTAVYYCAVSYYSYDVLDYWGQGTTVTVSSGGGGSGGGGSGGGGSGGGGSDIQMTQSPSFLSASVGDRVTITCKASQNVGDRVAWHQQKPGKAPKALIYSSSHRYKGVPSRFSGSGSGTEFTLTISSLQPEDFATYFCQQFKSYPLTFGQGTKLEIK

SEQ ID NO: 1330 - protein, 246 aa, Artificial Sequence
  Description of Artificial Sequence: Synthetic polypeptide
QVQLVQSGAEVKKPGSSVKVSCKASGHDFKLTYIHWVRQAPGQGLEWMGRVSAGSGNTKYNEKFKGRVTITADTSTSTAYMELSSLRSEDTAVYYCAVSYYSYDVLDYWGQGTTVTVSSGGGGSGGGGSGGGGSGGGGSDIQMTQSPSFLSASVGDRVTITCKASQNVDNRVAWHQQKPGKAPKALIYSSSHRYKGVPSRFSGSGSGTEFTLTISSLQPEDFATYFCQQFKSYPLTFGQGTKLEIK

SEQ ID NO: 1331 - protein, 246 aa, Artificial Sequence
  Description of Artificial Sequence: Synthetic polypeptide
QVQLVQSGAEVKKPGSSVKVSCKASGHDFRLTYIHWVRQAPGQGLEWMGRVSAGSGNVKYNEKFKGRVTITADTSTSTAYMELSSLRSEDTAVYYCAVSYYSYDVLDYWGQGTTVTVSSGGGGSGGGGSGGGGSGGGGSDIQMTQSPSFLSASVGDRVTITCKASQNVADRVVWHQQKPGKAPKALIYSSSHRYKGVPSRFSGSGSGTEFTLTISSLQPEDFATYFCQQFKSYPLTFGQGTKLEIK

SEQ ID NO: 1332 - protein, 246 aa, Artificial Sequence
  Description of Artificial Sequence: Synthetic polypeptide
QVQLVQSGAEVKKPGSSVKVSCKASGHDFRLTYIHWVRQAPGQGLEWMGRVYAGSGNTKYNEKFKGRVTITADTSTSTAYMELSSLRSEDTAVYYCAVSYYSYDVLDYWGQGTTVTVSSGGGGSGGGGSGGGGSGGGGSDIQMTQSPSFLSASVGDRVTITCKASQNVEDRVVWHQQKPGKAPKALIYSSSHRYKGVPSRFSGSGSGTEFTLTISSLQPEDFATYFCQQFKSYPLTFGQGTKLEIK

SEQ ID NO: 1333 - protein, 246 aa, Artificial Sequence
  Description of Artificial Sequence: Synthetic polypeptide
QVQLVQSGAEVKKPGSSVKVSCKASGHDFKLTYIHWVRQAPGQGLEWMGRVSAGSGNTKYNEKFKGRVTITADTSTSTAYMELSSLRSEDTAVYYCAVSYYSYDVLDYWGQGTTVTVSSGGGGSGGGGSGGGGSGGGGSDIQMTQSPSFLSASVGDRVTITCKASQNVADRVVWHQQKPGKAPKALIYSSSHRYKGVPSRFSGSGSGTEFTLTISSLQPEDFATYFCQQFKSYPLTFGQGTKLEIK

SEQ ID NO: 1334 - protein, 246 aa, Artificial Sequence
  Description of Artificial Sequence: Synthetic polypeptide
QVQLVQSGAEVKKPGSSVKVSCKASGHDFKLTYIHWVRQAPGQGLEWMGRISAGSGNTKYNEKFKGRVTITADTSTSTAYMELSSLRSEDTAVYYCAVSYYSYDVLDYWGQGTTVTVSSGGGGSGGGGSGGGGSGGGGSDIQMTQSPSFLSASVGDRVTITCKASQNVGDRVVWHQQKPGKAPKALIYSSSHRYKGVPSRFSGSGSGTEFTLTISSLQPEDFATYFCQQFKSYPLTFGQGTKLEIK

SEQ ID NO: 1335 - protein, 246 aa, Artificial Sequence
  Description of Artificial Sequence: Synthetic polypeptide
QVQLVQSGAEVKKPGSSVKVSCKASGHDFKLTYIHWVRQAPGQGLEWMGRIYAGSGNTKYNEKFKGRVTITADTSTSTAYMELSSLRSEDTAVYYCAVSYYSYDVLDYWGQGTTVTVSSGGGGSGGGGSGGGGSGGGGSDIQMTQSPSFLSASVGDRVTITCKASQNVGDRVVWHQQKPGKAPKALIYSSSHRYKGVPSRFSGSGSGTEFTLTISSLQPEDFATYFCQQFKSYPLTFGQGTKLEIK

SEQ ID NO: 1336 - protein, 246 aa, Artificial Sequence
  Description of Artificial Sequence: Synthetic polypeptide
QVQLVQSGAEVKKPGSSVKVSCKASGTDFKLTYIHWVRQAPGQGLEWMGRIFPGSGNVKYNEKFKGRVTITADTSTSTAYMELSSLRSEDTAVYYCAVSYYSYDVLDYWGQGTTVTVSSGGGGSGGGGSGGGGSGGGGSDIQMTQSPSFLSASVGDRVTITCKASQNVDNRVAWYQQKPGKAPKALIYSSSHRYKGVPSRFSGSGSGTEFTLTISSLQPEDFATYFCQQFKSYPLTFGQGTKLEIK

SEQ ID NO: 1337 - protein, 246 aa, Artificial Sequence
  Description of Artificial Sequence: Synthetic polypeptide
QVQLVQSGAEVKKPGSSVKVSCKASGHDFRLTYIHWVRQAPGQGLEWMGRISAGSGNVKYNEKFKGRVTITADTSTSTAYMELSSLRSEDTAVYYCAVSYYSYDVLDYWGQGTTVTVSSGGGGSGGGGSGGGGSGGGGSDIQMTQSPSFLSASVGDRVTITCKASQNVADRVAWYQQKPGKAPKALIYSSSHRYKGVPSRFSGSGSGTEFTLTISSLQPEDFATYFCQQFKSYPLTFGQGTKLEIK

SEQ ID NO: 1338 - protein, 243 aa, Artificial Sequence
  Description of Artificial Sequence: Synthetic polypeptide
EVQLVESGGGLVQPGGSLRLSCAASGFTFSNFGMHWVRQAPGKGLEWVSYISSGSSTIYYADTLKGRFTISRDNSKNTLYLQMNSLRAEDTAVYYCARRGEGAMDYWGQGTTVTVSSGGGGSGGGGSGGGGSGGGGSDNQLTQSPSSLSASVGDRVTITCRASSSVNYIYWYQQKPGKAPKLLIYYTSNLAPGVPSRFSGSGSGNDYTLTISSLQPEDFATYYCQQFTSSPFTFGQGTKLEIK

SEQ ID NO: 1339 - protein, 242 aa, Artificial Sequence
  Description of Artificial Sequence: Synthetic polypeptide
EVQLVESGGGLVQPGGSLRLSCAASGFTFSNFGMHWVRQAPGKGLEWVSYISSGSSTIYYADTLKGRFTISRDNSKNTLYLQMNSLRAEDTAVYYCARRGEGAMDYWGQGTTVTVSSGGGGSGGGGSGGGGSGGGGSSNELTQPPSVSVSPGQTARITCRASSSVNYIYWYQQKSGQAPVLVIYYTSNLAPGIPERFSGSGSGNMYTLTISGAQVEDEADYYCQQFTSSPFTFGTGTKVTVL

SEQ ID NO: 1340 - protein, 243 aa, Artificial Sequence
  Description of Artificial Sequence: Synthetic polypeptide
QVQLVESGGGVVQPGRSLRLSCAASGFTFSNFGMHWVRQAPGKGLEWVAYISSGSSTIYYADTLKGRFTISRDNSKNTLYLQMNSLRAEDTAVYYCARRGEGAMDYWGQGTTVTVSSGGGGSGGGGSGGGGSGGGGSDNQLTQSPSFLSASVGDRVTITCRASSSVNYIYWYQQKPGKAPKLLIYYTSNLAPGVPSRFSGSGSGNEYTLTISSLQPEDFATYYCQQFTSSPFTFGQGTKLEIK

SEQ ID NO: 1341 - protein, 243 aa, Artificial Sequence
  Description of Artificial Sequence: Synthetic polypeptide
QVQLVESGGGVVQPGRSLRLSCAASGFTFSNFGMHWVRQAPGKGLEWVAYISSGSSTIYYADTLKGRFTISRDNSKNTLYLQMNSLRAEDTAVYYCARRGEGAMDYWGQGTTVTVSSGGGGSGGGGSGGGGSGGGGSDNQLTQSPSSLSASVGDRVTITCRASSSVNYIYWYQQKPGKAPKLLIYYTSNLAPGVPSRFSGSGSGNDYTLTISSLQPEDFATYYCQQFTSSPFTFGQGTKLEIK

SEQ ID NO: 1342 - protein, 242 aa, Artificial Sequence
  Description of Artificial Sequence: Synthetic polypeptide
QVQLVESGGGVVQPGRSLRLSCAASGFTFSNFGMHWVRQAPGKGLEWVAYISSGSSTIYYADTLKGRFTISRDNSKNTLYLQMNSLRAEDTAVYYCARRGEGAMDYWGQGTTVTVSSGGGGSGGGGSGGGGSGGGGSSNELTQPPSVSVSPGQTARITCRASSSVNYIYWYQQKSGQAPVLVIYYTSNLAPGIPERFSGSGSGNMYTLTISGAQVEDEADYYCQQFTSSPFTFGTGTKVTVL

SEQ ID NO: 1343 - skipped

SEQ ID NO: 1344 - protein, 119 aa, Artificial Sequence
  Description of Artificial Sequence: Synthetic polypeptide
QVQLVQSGAEVKKPGSSVKVSCKASGHDFRLTYIHWVRQAPGQGLEWMGRVSAGSGNTKYNEKFKGRVTITADTSTSTAYMELSSLRSEDTAVYYCAVSYYSYDVLDYWGQGTTVTVSS

SEQ ID NO: 1345 - skipped

SEQ ID NO: 1346 - protein, 119 aa, Artificial Sequence
  Description of Artificial Sequence: Synthetic polypeptide
QVQLVQSGAEVKKPGSSVKVSCKASGHDFRLTYIHWVRQAPGQGLEWMGRVSAGSGNVKYNEKFKGRVTITADTSTSTAYMELSSLRSEDTAVYYCAVSYYSYDVLDYWGQGTTVTVSS

SEQ ID NO: 1347 - protein, 107 aa, Artificial Sequence
  Description of Artificial Sequence: Synthetic polypeptide
DIQMTQSPSFLSASVGDRVTITCKASQNVGNRVVWHQQKPGKAPKALIYSSSHRYKGVPSRFSGSGSGTEFTLTISSLQPEDFATYFCQQFKSYPLTFGQGTKLEIK

SEQ ID NO: 1348 - protein, 119 aa, Artificial Sequence
  Description of Artificial Sequence: Synthetic polypeptide
QVQLVQSGAEVKKPGSSVKVSCKASGHDFRLTYIHWVRQAPGQGLEWMGRIYAGSGNVKYNEKFKGRVTITADTSTSTAYMELSSLRSEDTAVYYCAVSYYSYDVLDYWGQGTTVTVSS

SEQ ID NO: 1349 - protein, 107 aa, Artificial Sequence
  Description of Artificial Sequence: Synthetic polypeptide
DIQMTQSPSFLSASVGDRVTITCKASQNVADRVVWHQQKPGKAPKALIYSSSHRYKGVPSRFSGSGSGTEFTLTISSLQPEDFATYFCQQFKSYPLTFGQGTKLEIK

SEQ ID NO: 1350 - protein, 119 aa, Artificial Sequence
  Description of Artificial Sequence: Synthetic polypeptide
QVQLVQSGAEVKKPGSSVKVSCKASGHDFKLTYIHWVRQAPGQGLEWMGRVSAGSGNTKYNEKFKGRVTITADTSTSTAYMELSSLRSEDTAVYYCAVSYYSYDVLDYWGQGTTVTVSS

SEQ ID NO: 1351 - protein, 107 aa, Artificial Sequence; identical to SEQ ID NO: 160
  Description of Artificial Sequence: Synthetic polypeptide

SEQ ID NO: 1352 - skipped

SEQ ID NO: 1353 - protein, 107 aa, Artificial Sequence; identical to SEQ ID NO: 199
  Description of Artificial Sequence: Synthetic polypeptide

SEQ ID NO: 1354-1355 - skipped (2 entries)

SEQ ID NO: 1356 - protein, 119 aa, Artificial Sequence
  Description of Artificial Sequence: Synthetic polypeptide
QVQLVQSGAEVKKPGSSVKVSCKASGHDFRLTYIHWVRQAPGQGLEWMGRVYAGSGNTKYNEKFKGRVTITADTSTSTAYMELSSLRSEDTAVYYCAVSYYSYDVLDYWGQGTTVTVSS

SEQ ID NO: 1357 - protein, 107 aa, Artificial Sequence
  Description of Artificial Sequence: Synthetic polypeptide
DIQMTQSPSFLSASVGDRVTITCKASQNVEDRVVWHQQKPGKAPKALIYSSSHRYKGVPSRFSGSGSGTEFTLTISSLQPEDFATYFCQQFKSYPLTFGQGTKLEIK

SEQ ID NO: 1358-1359 - skipped (2 entries)

SEQ ID NO: 1360 - protein, 119 aa, Artificial Sequence
  Description of Artificial Sequence: Synthetic polypeptide
QVQLVQSGAEVKKPGSSVKVSCKASGHDFKLTYIHWVRQAPGQGLEWMGRISAGSGNTKYNEKFKGRVTITADTSTSTAYMELSSLRSEDTAVYYCAVSYYSYDVLDYWGQGTTVTVSS

SEQ ID NO: 1361 - protein, 107 aa, Artificial Sequence
  Description of Artificial Sequence: Synthetic polypeptide
DIQMTQSPSFLSASVGDRVTITCKASQNVGDRVVWHQQKPGKAPKALIYSSSHRYKGVPSRFSGSGSGTEFTLTISSLQPEDFATYFCQQFKSYPLTFGQGTKLEIK

SEQ ID NO: 1362 - protein, 119 aa, Artificial Sequence
  Description of Artificial Sequence: Synthetic polypeptide
QVQLVQSGAEVKKPGSSVKVSCKASGHDFKLTYIHWVRQAPGQGLEWMGRIYAGSGNTKYNEKFKGRVTITADTSTSTAYMELSSLRSEDTAVYYCAVSYYSYDVLDYWGQGTTVTVSS

SEQ ID NO: 1363-1364 - skipped (2 entries)

SEQ ID NO: 1365 - protein, 107 aa, Artificial Sequence
  Description of Artificial Sequence: Synthetic polypeptide
DIQMTQSPSFLSASVGDRVTITCRASQNVDNRLGWHQQKPGKAPKALIYSSSHRYKGVPSRFSGSGSGTEFTLTISSLQPEDFATYFCQQFKSYPLTFGQGTKLEIK

SEQ ID NO: 1366 - skipped

SEQ ID NO: 1367 - protein, 107 aa, Artificial Sequence
  Description of Artificial Sequence: Synthetic polypeptide
DIQMTQSPSFLSASVGDRVTITCKASQNVDNRVAWHQQKPGKAPKALIYAASSLQKGVPSRFSGSGSGTEFTLTISSLQPEDFATYFCQQFKSYPLTFGQGTKLEIK

SEQ ID NO: 1368 - skipped

SEQ ID NO: 1369 - protein, 107 aa, Artificial Sequence
  Description of Artificial Sequence: Synthetic polypeptide
DIQMTQSPSFLSASVGDRVTITCKASQNVDNRVAWHQQKPGKAPKALIYSSSHRYKGVPSRFSGSGSGTEFTLTISSLQPEDFATYFCLQHNSYPLTFGQGTKLEIK

SEQ ID NO: 1370 - protein, 119 aa, Artificial Sequence
  Description of Artificial Sequence: Synthetic polypeptide
QVQLVQSGAEVKKPGSSVKVSCKASGHDFKLTYIHWVRQAPGQGLEWMGRVSAGSGNVNYAQKFQGRVTITADTSTSTAYMELSSLRSEDTAVYYCAVSYYSYDVLDYWGQGTTVTVSS

SEQ ID NO: 1371-1375 - skipped (5 entries)

SEQ ID NO: 1376 - protein, 252 aa, Artificial Sequence
  Description of Artificial Sequence: Synthetic polypeptide
QVQLQQSGTELMKPGASVKISCKASGYTFSNYWIEWIKQRPGHGLEWVGEILPGAGPTNYNEKFKGKATFTADSSSNTAYMQLSSLTSEDSAVYYCARTDYDYDWFAYWGQGTLVTVSAGGGGSGGGGSGGGGSGGGGSDIVMSQSPSSLAVSVGEKVTMSCKSSQSLLYSGNQKNYLAWYQQKPGQSPKLLIYWASTRESGVPDRFTGSGSGTDFTLTINSVKAEDLTVYYCQQYYGYPRTFGGGTKVEIK

SEQ ID NO: 1377-2999 - skipped (1623 entries)

SEQ ID NO: 3000 - protein, 107 aa, Artificial Sequence
  Description of Artificial Sequence: Synthetic polypeptide
DIQMTQSPSFLSASVGDRVTITCSASQGISNYLNWYQQKPGKAVKLLIYYTSSLHSGVPSRFSGSGSGTEYTLTISSLQPEDFATYYCQQYSKLPRTFGGGTKVEIK

SEQ ID NO: 3001 - protein, 107 aa, Artificial Sequence
  Description of Artificial Sequence: Synthetic polypeptide
DIQMTQSPSSLSASVGDRVTITCSASQGISNYLNWYQQKPGKAVKLLIYYTSSLHSGVPSRFSGSGSGTDYTLTISSLQPEDFATYYCQQYSKLPRTFGGGTKVEIK

SEQ ID NO: 3002 - protein, 107 aa, Artificial Sequence
  Description of Artificial Sequence: Synthetic polypeptide
DIQMTQSPSSLSASVGDRVTITCSASQGISNYLNWYQQKPGKVVKLLIYYTSSLHSGVPSRFSGSGSGTDYTLTISSLQPEDVATYYCQQYSKLPRTFGGGTKVEIK

SEQ ID NO: 3003 - protein, 107 aa, Artificial Sequence
  Description of Artificial Sequence: Synthetic polypeptide
DIQMTQSPSSLSASVGDRVTITCSASQGISNYLNWYQQKPGQAVKLLIYYTSSLHSGVPSRFSGSGSGTDYTLTISSLQPEDVATYYCQQYSKLPRTFGGGTKVEIK

SEQ ID NO: 3004 - protein, 107 aa, Artificial Sequence
  Description of Artificial Sequence: Synthetic polypeptide
DIQMTQSPSSLSASVGDRVTITCSASQGISNYLNWYQQKPGKAVKLLIYYTSSLHSGVPSRFSGSGSGTDYTFTISSLQPEDIATYYCQQYSKLPRTFGGGTKVEIK

SEQ ID NO: 3005 - protein, 107 aa, Artificial Sequence
  Description of Artificial Sequence: Synthetic polypeptide
DIQMTQSPSSLSASVGDRVTITCSASQGISNYLNWYQQKPGKTVKLLIYYTSSLHSGIPSRFSGSGSGTDYTLTIRSLQPEDFATYYCQQYSKLPRTFGGGTKVEIK

SEQ ID NO: 3006 - protein, 107 aa, Artificial Sequence
  Description of Artificial Sequence: Synthetic polypeptide
AIQMTQSPSSLSASVGDRVTITCSASQGISNYLNWYQQKPGKAVKLLIYYTSSLHSGVPSRFSGSGSGTDYTLTISSLQPEDFATYYCQQYSKLPRTFGGGTKVEIK

SEQ ID NO: 3007 - protein, 107 aa, Artificial Sequence
  Description of Artificial Sequence: Synthetic polypeptide
DIQMTQSPSSVSASVGDRVTITCSASQGISNYLNWYQQKPGKAVKLLIYYTSSLHSGVPSRFSGSGSGTDYTLTISSLQPEDFATYYCQQYSKLPRTFGGGTKVEIK

SEQ ID NO: 3008 - protein, 107 aa, Artificial Sequence
  Description of Artificial Sequence: Synthetic polypeptide
DIQMTQSPSSLSASVGDRVTITCSASQGISNYLNWYQQKPGKAVKRLIYYTSSLHSGVPSRFSGSGSGTEYTLTISNLQPEDFATYYCQQYSKLPRTFGGGTKVEIK

SEQ ID NO: 3009 - protein, 107 aa, Artificial Sequence
  Description of Artificial Sequence: Synthetic polypeptide
AIRMTQSPFSLSASVGDRVTITCSASQGISNYLNWYQQKPAKAVKLFIYYTSSLHSGVPSRFSGSGSGTDYTLTISSLQPEDFATYYCQQYSKLPRTFGGGTKVEIK

SEQ ID NO: 3010 - protein, 107 aa, Artificial Sequence
  Description of Artificial Sequence: Synthetic polypeptide
DIQMTQSPSSLSASVGDRVTITCSASQGISNYLNWYQQKPGKAVKRLIYYTSSLHSGVPSRFSGSGSGTEYTLTISSLQPEDFATYYCQQYSKLPRTFGGGTKVEIK

SEQ ID NO: 3011 - protein, 107 aa, Artificial Sequence
  Description of Artificial Sequence: Synthetic polypeptide
DIQMTQSPSTLSASVGDRVTITCSASQGISNYLNWYQQKPGKAVKLLIYYTSSLHSGVPSRFSGSGSGTEYTLTISSLQPDDFATYYCQQYSKLPRTFGGGTKVEIK

SEQ ID NO: 3012 - protein, 107 aa, Artificial Sequence
  Description of Artificial Sequence: Synthetic polypeptide
DIQMTQSPSSLSASVGDRVTITCSASQGISNYLNWYQQKPGKAVKSLIYYTSSLHSGVPSRFSGSGSGTDYTLTISSLQPEDFATYYCQQYSKLPRTFGGGTKVEIK

SEQ ID NO: 3013 - protein, 107 aa, Artificial Sequence
  Description of Artificial Sequence: Synthetic polypeptide
DIQMTQSPSSLSASVGDRVTITCSASQGISNYLNWYQQKPGKAVKSLIYYTSSLHSGVPSKFSGSGSGTDYTLTISSLQPEDFATYYCQQYSKLPRTFGGGTKVEIK

SEQ ID NO: 3014 - protein, 107 aa, Artificial Sequence
  Description of Artificial Sequence: Synthetic polypeptide
DIQMTQSPSSLSASVGDRVTITCSASQGISNYLNWYQQKPEKAVKSLIYYTSSLHSGVPSRFSGSGSGTDYTLTISSLQPEDFATYYCQQYSKLPRTFGGGTKVEIK

SEQ ID NO: 3015 - protein, 107 aa, Artificial Sequence
  Description of Artificial Sequence: Synthetic polypeptide
DIQMTQSPSAMSASVGDRVTITCSASQGISNYLNWYQQKPGKVVKRLIYYTSSLHSGVPSRFSGSGSGTEYTLTISSLQPEDFATYYCQQYSKLPRTFGGGTKVEIK

SEQ ID NO: 3016 - protein, 107 aa, Artificial Sequence
  Description of Artificial Sequence: Synthetic polypeptide
DIVMTQSPDSLAVSLGERATINCSASQGISNYLNWYQQKPGQPVKLLIYYTSSLHSGVPDRFSGSGSGTDYTLTISSLQAEDVAVYYCQQYSKLPRTFGGGTKVEIK

SEQ ID NO: 3017 - protein, 107 aa, Artificial Sequence
  Description of Artificial Sequence: Synthetic polypeptide
EIVMTQSPGTLSLSPGERATLSCSASQGISNYLNWYQQKPGQAVKLLIYYTSSLHSGIPDRFSGSGSGTDYTLTISRLEPEDFAVYYCQQYSKLPRTFGGGTKVEIK

SEQ ID NO: 3018 - protein, 107 aa, Artificial Sequence
  Description of Artificial Sequence: Synthetic polypeptide
EIVMTQSPPTLSLSPGERVTLSCSASQGISNYLNWYQQKPGQAVKLLIYYTSSLHSGIPARFSGSGSGTDYTLTISSLQPEDFAVYYCQQYSKLPRTFGGGTKVEIK

SEQ ID NO: 3019 - protein, 107 aa, Artificial Sequence
  Description of Artificial Sequence: Synthetic polypeptide
EIVMTQSPPTLSLSPGERVTLSCSASQGISNYLNWYQQKPGQAVKLLIYYTSSLHSSIPARFSGSGSGTDYTLTISSLQPEDFAVYYCQQYSKLPRTFGGGTKVEIK

SEQ ID NO: 3020 - protein, 107 aa, Artificial Sequence
  Description of Artificial Sequence: Synthetic polypeptide
EIVMTQSPATLSLSPGERATLSCSASQGISNYLNWYQQKPGQAVKLLIYYTSSLHSGIPARFSGSGSGTDYTLTISSLEPEDFAVYYCQQYSKLPRTFGGGTKVEIK

SEQ ID NO: 3021 - protein, 107 aa, Artificial Sequence
  Description of Artificial Sequence: Synthetic polypeptide
EIVMTQSPATLSLSPGERATLSCSASQGISNYLNWYQQKPGQAVKLLIYYTSSLHSGIPARFSGSGSGTDYTLTISRLEPEDFAVYYCQQYSKLPRTFGGGTKVEIK

SEQ ID NO: 3022 - protein, 107 aa, Artificial Sequence
  Description of Artificial Sequence: Synthetic polypeptide
EIVMTQSPATLSLSPGERATLSCSASQGISNYLNWYQQKPGQAVKLLIYYTSSLHSGIPDRFSGSGSGTDYTLTISRLEPEDFAVYYCQQYSKLPRTFGGGTKVEIK

SEQ ID NO: 3023 - protein, 107 aa, Artificial Sequence
  Description of Artificial Sequence: Synthetic polypeptide
EIVMTQSPATLSLSPGERATLSCSASQGISNYLNWYQQKPGLAVKLLIYYTSSLHSGIPDRFSGSGSGTDYTLTISRLEPEDFAVYYCQQYSKLPRTFGGGTKVEIK

SEQ ID NO: 3024 - protein, 107 aa, Artificial Sequence
  Description of Artificial Sequence: Synthetic polypeptide
DIQMIQSPSFLSASVGDRVSIICSASQGISNYLNWYLQKPGKSVKLFIYYTSSLHSGVSSRFSGRGSGTDYTLTIISLKPEDFAAYYCQQYSKLPRTFGGGTKVEIK

SEQ ID NO: 3025 - protein, 107 aa, Artificial Sequence
  Description of Artificial Sequence: Synthetic polypeptide
EIVMTQSPATLSLSPGERATLSCSASQGISNYLNWYQQKPGQAVKLLIYYTSSLHSGIPARFSGSGSGTDYTLTISSLQPEDFAVYYCQQYSKLPRTFGGGTKVEIK

SEQ ID NO: 3026 - protein, 107 aa, Artificial Sequence
  Description of Artificial Sequence: Synthetic polypeptide
EIVMTQSPATLSLSPGERATLSCSASQGISNYLNWYQQKPGQAVKLLIYYTSSLHSGIPARFSGSGPGTDYTLTISSLEPEDFAVYYCQQYSKLPRTFGGGTKVEIK

SEQ ID NO: 3027 - protein, 107 aa, Artificial Sequence
  Description of Artificial Sequence: Synthetic polypeptide
DIVMTQTPLSLSVTPGQPASISCSASQGISNYLNWYLQKPGQSVKLLIYYTSSLHSGVPDRFSGSGSGTDYTLKISRVEAEDVGVYYCQQYSKLPRTFGGGTKVEIK

SEQ ID NO: 3028 - protein, 107 aa, Artificial Sequence
  Description of Artificial Sequence: Synthetic polypeptide
DIVMTQTPLSLSVTPGQPASISCSASQGISNYLNWYLQKPGQPVKLLIYYTSSLHSGVPDRFSGSGSGTDYTLKISRVEAEDVGVYYCQQYSKLPRTFGGGTKVEIK

SEQ ID NO: 3029 - protein, 107 aa, Artificial Sequence
  Description of Artificial Sequence: Synthetic polypeptide
DIVMTQSPAFLSVTPGEKVTITCSASQGISNYLNWYQQKPDQAVKLLIYYTSSLHSGVPSRFSGSGSGTDYTFTISSLEAEDAATYYCQQYSKLPRTFGGGTKVEIK

SEQ ID NO: 3030 - protein, 107 aa, Artificial Sequence
  Description of Artificial Sequence: Synthetic polypeptide
DIVMTQSPLSLPVTPGEPASISCSASQGISNYLNWYLQKPGQSVKLLIYYTSSLHSGVPDRFSGSGSGTDYTLKISRVEAEDVGVYYCQQYSKLPRTFGGGTKVEIK

SEQ ID NO: 3031 - protein, 107 aa, Artificial Sequence
  Description of Artificial Sequence: Synthetic polypeptide
DIVMTQTPLSLPVTPGEPASISCSASQGISNYLNWYLQKPGQSVKLLIYYTSSLHSGVPDRFSGSGSGTDYTLKISRVEAEDVGVYYCQQYSKLPRTFGGGTKVEIK

SEQ ID NO: 3032 - protein, 107 aa, Artificial Sequence
  Description of Artificial Sequence: Synthetic polypeptide
EIVMTQSPATLSVSPGERATLSCSASQGISNYLNWYQQKPGQAVKLLIYYTSSLHSGIPARFSGSGSGTEYTLTISILQSEDFAVYYCQQYSKLPRTFGGGTKVEIK

SEQ ID NO: 3033 - protein, 107 aa, Artificial Sequence
  Description of Artificial Sequence: Synthetic polypeptide
EIVMTQSPATLSVSPGERATLSCSASQGISNYLNWYQQKPGQAVKLLIYYTSSLHSGIPARFSGSGSGTEYTLTISSLQSEDFAVYYCQQYSKLPRTFGGGTKVEIK

SEQ ID NO: 3034 - protein, 107 aa, Artificial Sequence
  Description of Artificial Sequence: Synthetic polypeptide
DIVMTQSPLSLPVTLGQPASISCSASQGISNYLNWYQQRPGQSVKRLIYYTSSLHSGVPDRFSGSGSGTDYTLKISRVEAEDVGVYYCQQYSKLPRTFGGGTKVEIK

SEQ ID NO: 3035 - protein, 107 aa, Artificial Sequence
  Description of Artificial Sequence: Synthetic polypeptide
EITMTQSPAFMSATPGDKVNISCSASQGISNYLNWYQQKPGEAVKFIIYYTSSLHSGIPPRFSGSGYGTDYTLTINNIESEDAAYYYCQQYSKLPRTFGGGTKVEIK

SEQ ID NO: 3036 - protein, 107 aa, Artificial Sequence
  Description of Artificial Sequence: Synthetic polypeptide
DIVMTQTPLSSPVTLGQPASISCSASQGISNYLNWYQQRPGQPVKLLIYYTSSLHSGVPDRFSGSGAGTDYTLKISRVEAEDVGVYYCQQYSKLPRTFGGGTKVEIK

SEQ ID NO: 3037 - protein, 107 aa, Artificial Sequence
  Description of Artificial Sequence: Synthetic polypeptide
EIVMTQSPDFQSVTPKEKVTITCSASQGISNYLNWYQQKPDQSVKLLIYYTSSLHSGVPSRFSGSGSGTDYTLTINSLEAEDAATYYCQQYSKLPRTFGGGTKVEIK

SEQ ID NO: 3038 - protein, 107 aa, Artificial Sequence
  Description of Artificial Sequence: Synthetic polypeptide
EIVMTQTPLSLSITPGEQASISCSASQGISNYLNWYLQKARPVVKLLIYYTSSLHSGVPDRFSGSGSGTDYTLKISRVEAEDFGVYYCQQYSKLPRTFGGGTKVEIK

SEQ ID NO: 3039 - protein, 107 aa, Artificial Sequence
  Description of Artificial Sequence: Synthetic polypeptide
EIVMTQTPLSLSITPGEQASMSCSASQGISNYLNWYLQKARPVVKLLIYYTSSLHSGVPDRFSGSGSGTDYTLKISRVEAEDFGVYYCQQYSKLPRTFGGGTKVEIK

SEQ ID NO: 3040 - protein, 120 aa, Artificial Sequence
  Description of Artificial Sequence: Synthetic polypeptide
QVTLKESGPVLVKPTETLTLTCTVSGFSLTAYGVNWVRQPPGKALEWLGMIWGDGNTDYNSALKSRLTISKDNSKSQVVLTMTNMDPVDTATYYCARDRVTATLYAMDYWGQGTLVTVSS

SEQ ID NO: 3041 - protein, 120 aa, Artificial Sequence
  Description of Artificial Sequence: Synthetic polypeptide
QVTLKESGPALVKPTETLTLTCTVSGFSLTAYGVNWVRQPPGKALEWLGMIWGDGNTDYNSALKSRLIISKDNSKSQVVLTMTNMDPVDTATYYCARDRVTATLYAMDYWGQGTLVTVSS

SEQ ID NO: 3042 - protein, 120 aa, Artificial Sequence
  Description of Artificial Sequence: Synthetic polypeptide
QVTLKESGPALVKPTQTLTLTCTVSGFSLTAYGVNWVRQPPGKALEWLGMIWGDGNTDYNSALKSRLTISKDNSKSQVVLTMTNMDPVDTATYYCARDRVTATLYAMDYWGQGTLVTVSS

SEQ ID NO: 3043 - protein, 120 aa, Artificial Sequence
  Description of Artificial Sequence: Synthetic polypeptide
QVQLQESGPGLVKPSGTLSLTCAVSGFSLTAYGVNWVRQPPGKGLEWLGMIWGDGNTDYNSALKSRLTISKDNSKSQVSLKLSSVTAADTAVYYCARDRVTATLYAMDYWGQGTLVTVSS

SEQ ID NO: 3044 - protein, 120 aa, Artificial Sequence
  Description of Artificial Sequence: Synthetic polypeptide
QVTLKESGPTLVKPTQTLTLTCTVSGFSLTAYGVNWVRQPPGKALEWLGMIWGDGNTDYNSALKSRLTITKDNSKSQVVLTMTNMDPVDTATYYCARDRVTATLYAMDYWGQGTLVTVSS

SEQ ID NO: 3045 - protein, 120 aa, Artificial Sequence
  Description of Artificial Sequence: Synthetic polypeptide
QVTLKESGPALVKPTQTLTLTCTVSGFSLTAYGVNWVRQPPGKALEWLGMIWGDGNTDYNSALKSRLTITKDNSKSQVVLTMTNMDPVDTATYYCARDRVTATLYAMDYWGQGTLVTVSS

SEQ ID NO: 3046 - protein, 120 aa, Artificial Sequence
  Description of Artificial Sequence: Synthetic polypeptide
QVQLQESGPGLVKPSQTLSLTCTVSGFSLTAYGVNWVRQPPGKGLEWLGMIWGDGNTDYNSALKSRLTISKDNSKSQVSLKLSSVTAADTAVYYCARDRVTATLYAMDYWGQGTLVTVSS

SEQ ID NO: 3047 - protein, 120 aa, Artificial Sequence
  Description of Artificial Sequence: Synthetic polypeptide
QVQLQESGPGLVKPSETLSLTCTVSGFSLTAYGVNWVRQPPGKGLEWLGMIWGDGNTDYNSALKSRLTISKDNSKSQVSLKLSSVTAADTAVYYCARDRVTATLYAMDYWGQGTLVTVSS

SEQ ID NO: 3048 - protein, 120 aa, Artificial Sequence
  Description of Artificial Sequence: Synthetic polypeptide
QVQLQESGPGLVKPSQTLSLTCAVSGFSLTAYGVNWVRQPPGKGLEWLGMIWGDGNTDYNSALKSRLTISKDNSKSQVSLKLSSVTAADTAVYYCARDRVTATLYAMDYWGQGTLVTVSS

SEQ ID NO: 3049 - protein, 120 aa, Artificial Sequence
  Description of Artificial Sequence: Synthetic polypeptide
QVQLQESGPGLVKPSDTLSLTCTVSGFSLTAYGVNWVRQPPGKGLEWLGMIWGDGNTDYNSALKSRLTISKDNSKSQVSLKLSSVTAADTAVYYCARDRVTATLYAMDYWGQGTLVTVSS

SEQ ID NO: 3050 - protein, 120 aa, Artificial Sequence
  Description of Artificial Sequence: Synthetic polypeptide
QVQLQESGPGLVKPSQTLSLTCTVSGFSLTAYGVNWVRQHPGKGLEWLGMIWGDGNTDYNSALKSRLTISKDNSKSQVSLKLSSVTAADTAVYYCARDRVTATLYAMDYWGQGTLVTVSS

SEQ ID NO: 3051 - protein, 120 aa, Artificial Sequence
  Description of Artificial Sequence: Synthetic polypeptide
QVQLQESGPGLVKPSQTLSLTCTVSGFSLTAYGVNWVRQPAGKGLEWLGMIWGDGNTDYNSALKSRLTISKDNSKSQVSLKLSSVTAADTAVYYCARDRVTATLYAMDYWGQGTLVTVSS

SEQ ID NO: 3052 - protein, 120 aa, Artificial Sequence
  Description of Artificial Sequence: Synthetic polypeptide
QVQLQESGPGLVKPSQTLSLTCAVSGFSLTAYGVNWVRQPPGKGLEWLGMIWGDGNTDYNSALKSRLTISKDNSKSQVSLKLSSVTAVDTAVYYCARDRVTATLYAMDYWGQGTLVTVSS

SEQ ID NO: 3053 - protein, 120 aa, Artificial Sequence
  Description of Artificial Sequence: Synthetic polypeptide
QVQLQESGPGLVKPSETLSLTCTVSGFSLTAYGVNWVRQPPGKGLEWLGMIWGDGNTDYNSALKSRLTISKDNSKSHVSLKLSSVTAADTAVYYCARDRVTATLYAMDYWGQGTLVTVSS

SEQ ID NO: 3054 - protein, 120 aa, Artificial Sequence
  Description of Artificial Sequence: Synthetic polypeptide
QVQLQESGPGLVKPSETLSLTCAVSGFSLTAYGVNWVRQPPGKGLEWLGMIWGDGNTDYNSALKSRLTISKDNSKSQVSLKLSSVTAADTAVYYCARDRVTATLYAMDYWGQGTLVTVSS

SEQ ID NO: 3055 - protein, 120 aa, Artificial Sequence
  Description of Artificial Sequence: Synthetic polypeptide
QVQLQESGPGLVKPSQTLSLTCAVYGFSLTAYGVNWVRQPPGKGLEWLGMIWGDGNTDYNSALKSRLTISKDNSKSQVSLKLSSVTAADTAVYYCARDRVTATLYAMDYWGQGTLVTVSS

SEQ ID NO: 3056 - protein, 120 aa, Artificial Sequence
  Description of Artificial Sequence: Synthetic polypeptide
RVQLQESGPGLVKPSETLSLTCTVSGFSLTAYGVNWVRQPPGKGLEWLGMIWGDGNTDYNSALKSRLTISKDNSKSQVPLKLSSVTAADTAVYYCARDRVTATLYAMDYWGQGTLVTVSS

SEQ ID NO: 3057 - protein, 120 aa, Artificial Sequence
  Description of Artificial Sequence: Synthetic polypeptide
QVQLQESGPGLVKPSQTLSLTCTVSGFSLTAYGVNWVRQHPGKGLEWLGMIWGDGNTDYNSALKSLLTISKDNSKSQVSLKLSSVTAADTAVYYCARDRVTATLYAMDYWGQGTLVTVSS

SEQ ID NO: 3058 - protein, 120 aa, Artificial Sequence
  Description of Artificial Sequence: Synthetic polypeptide
QVQLQESGPGLVKPSDTLSLTCAVSGFSLTAYGVNWVRQPPGKGLEWLGMIWGDGNTDYNSALKSRLTISKDNSKSQVSLKLSSVTALDTAVYYCARDRVTATLYAMDYWGQGTLVTVSS

SEQ ID NO: 3059 - protein, 120 aa, Artificial Sequence
  Description of Artificial Sequence: Synthetic polypeptide
QVQLQESGPGLVKPSDTLSLTCAVSGFSLTAYGVNWVRQPPGKGLEWLGMIWGDGNTDYNSALKSRLTISKDNSKSQVSLKLSSVTAVDTAVYYCARDRVTATLYAMDYWGQGTLVTVSS

SEQ ID NO: 3060 - protein, 120 aa, Artificial Sequence
  Description of Artificial Sequence: Synthetic polypeptide
QVQLQESGSGLVKPSQTLSLTCAVSGFSLTAYGVNWVRQPPGKGLEWLGMIWGDGNTDYNSALKSRLTISKDNSKSQVSLKLSSVTAADTAVYYCARDRVTATLYAMDYWGQGTLVTVSS

SEQ ID NO: 3061 - protein, 120 aa, Artificial Sequence
  Description of Artificial Sequence: Synthetic polypeptide
EVQLVESGGGLVQPGRSLRLSCTVSGFSLTAYGVNWVRQAPGKGLEWLGMIWGDGNTDYNSALKSRLTISKDNSKSIVYLQMNSLKTEDTAVYYCARDRVTATLYAMDYWGQGTLVTVSS

SEQ ID NO: 3062 - protein, 120 aa, Artificial Sequence
  Description of Artificial Sequence: Synthetic polypeptide
EVQLVESGGGLVQPGPSLRLSCTVSGFSLTAYGVNWVRQAPGKGLEWLGMIWGDGNTDYNSALKSRLTISKDNSKSIVYLQMNSLKTEDTAVYYCARDRVTATLYAMDYWGQGTLVTVSS

SEQ ID NO: 3063 - protein, 120 aa, Artificial Sequence
  Description of Artificial Sequence: Synthetic polypeptide
QVQLQESGSGLVKPSQTLSLTCAVSGFSLTAYGVNWVRQSPGKGLEWLGMIWGDGNTDYNSALKSRLTISKDNSKSQVSLKLSSVTAADTAVYYCARDRVTATLYAMDYWGQGTLVTVSS

SEQ ID NO: 3064 - protein, 120 aa, Artificial Sequence
  Description of Artificial Sequence: Synthetic polypeptide
QVQLQESGPGLVKPSETLSLTCTVSGFSLTAYGVNWVRQPAGKGLEWLGMIWGDGNTDYNSALKSRLTISKDNSKSQVSLKLSSVTAADTAVYYCARDRVTATLYAMDYWGQGTLVTVSS

SEQ ID NO: 3065 - protein, 120 aa, Artificial Sequence
  Description of Artificial Sequence: Synthetic polypeptide
EVQLVESGGGLVKPGRSLRLSCTVSGFSLTAYGVNWVRQAPGKGLEWLGMIWGDGNTDYNSALKSRLTISKDNSKSIVYLQMNSLKTEDTAVYYCARDRVTATLYAMDYWGQGTLVTVSS

SEQ ID NO: 3066 - protein, 120 aa, Artificial Sequence
  Description of Artificial Sequence: Synthetic polypeptide
QVQLQESGPGLVKPSETLSLTCAVYGFSLTAYGVNWVRQPPGKGLEWLGMIWGDGNTDYNSALKSRLTISKDNSKSQVYLKLSSVTAADTAVYYCARDRVTATLYAMDYWGQGTLVTVSS

SEQ ID NO: 3067 - protein, 120 aa, Artificial Sequence
  Description of Artificial Sequence: Synthetic polypeptide
QVQLQESGPGLVKPSDTLSLTCAVSGFSLTAYGVNWVRQPPGKGLEWLGMIWGDGNTDYNSALKSRLTISKDNSKSQVSLKLSSVTAVDTGVYYCARDRVTATLYAMDYWGQGTLVTVSS

SEQ ID NO: 3068 - protein, 120 aa, Artificial Sequence
  Description of Artificial Sequence: Synthetic polypeptide
EVQLVESGGGLVQPGGSLRLSCAVSGFSLTAYGVNWVRQAPGKGLEWLGMIWGDGNTDYNSALKSRLTISKDNSKSSVYLQMNSLKTEDTAVYYCARDRVTATLYAMDYWGQGTLVTVSS

SEQ ID NO: 3069 - protein, 120 aa, Artificial Sequence
  Description of Artificial Sequence: Synthetic polypeptide
EVQLVESGGGLVKPGGSLRLSCAVSGFSLTAYGVNWVRQAPGKGLEWLGMIWGDGNTDYNSALKSRLTISKDNSKSTVYLQMNSLKTEDTAVYYCARDRVTATLYAMDYWGQGTLVTVSS

SEQ ID NO: 3070 - protein, 120 aa, Artificial Sequence
  Description of Artificial Sequence: Synthetic polypeptide
QVQLQQSGPGLVKPSQTLSLTCAVSGFSLTAYGVNWVRQSPSRGLEWLGMIWGDGNTDYNSALKSRLTINKDNSKSQVSLQLNSVTPEDTAVYYCARDRVTATLYAMDYWGQGTLVTVSS

SEQ ID NO: 3071 - protein, 120 aa, Artificial Sequence
  Description of Artificial Sequence: Synthetic polypeptide
QVQLVESGGGLVQPGGSLRLSCSVSGFSLTAYGVNWVRQAPGKGLEWLGMIWGDGNTDYNSALKSRLTISKDNSKSTVYLQMNSLRAEDTAVYYCARDRVTATLYAMDYWGQGTLVTVSS

SEQ ID NO: 3072 - protein, 120 aa, Artificial Sequence
  Description of Artificial Sequence: Synthetic polypeptide
QVQLQQWGAGLLKPSETLSLTCAVYGFSLTAYGVNWVRQPPGKGLEWLGMIWGDGNTDYNSALKSRLTISKDNSKSQVSLKLSSVTAADTAVYYCARDRVTATLYAMDYWGQGTLVTVSS

SEQ ID NO: 3073 - protein, 120 aa, Artificial Sequence
  Description of Artificial Sequence: Synthetic polypeptide
QVQLVESGGGVVQPGRSLRLSCAVSGFSLTAYGVNWVRQAPGKGLEWLGMIWGDGNTDYNSALKSRLTISKDNSTSTVFLQMNSLRAEDTAVYYCARDRVTATLYAMDYWGQGTLVTVSS

SEQ ID NO: 3074 - protein, 120 aa, Artificial Sequence
  Description of Artificial Sequence: Synthetic polypeptide
EVQLVESGGGLVQPGGSLRLSCAVSGFSLTAYGVNWVRQAPGKGLEWLGMIWGDGNTDYNSALKSRLTISKDNSKSTVYLQMNSLRAEDTAVYYCARDRVTATLYAMDYWGQGTLVTVSS

SEQ ID NO: 3075 - protein, 120 aa, Artificial Sequence
  Description of Artificial Sequence: Synthetic polypeptide
EVQLVESGGGLVQPGGSLRLSCAVSGFSLTAYGVNWVRQAPGKGLEWLGMIWGDGNTDYNSALKSRLTISKDNAKSSVYLQMNSLRDEDTAVYYCARDRVTATLYAMDYWGQGTLVTVSS

SEQ ID NO: 3076 - protein, 120 aa, Artificial Sequence
  Description of Artificial Sequence: Synthetic polypeptide
EVQLLESGGGLVQPGGSLRLSCAVSGFSLTAYGVNWVRQAPGKGLEWLGMIWGDGNTDYNSALKSRLTISKDNSKSTVYLQMNSLRAEDTAVYYCARDRVTATLYAMDYWGQGTLVTVSS

SEQ ID NO: 3077 - protein, 120 aa, Artificial Sequence
  Description of Artificial Sequence: Synthetic polypeptide
QVQLVESGGGLVKPGGSLRLSCAVSGFSLTAYGVNWVRQAPGKGLEWLGMIWGDGNTDYNSALKSRLTISKDNAKSSVYLQMNSLRAEDTAVYYCARDRVTATLYAMDYWGQGTLVTVSS

SEQ ID NO: 3078 - protein, 120 aa, Artificial Sequence
  Description of Artificial Sequence: Synthetic polypeptide
EVQLVESGGGLVQPGGSLKLSCAVSGFSLTAYGVNWVRQASGKGLEWLGMIWGDGNTDYNSALKSRLTISKDNSKSTVYLQMNSLKTEDTAVYYCARDRVTATLYAMDYWGQGTLVTVSS

SEQ ID NO: 3079 - protein, 120 aa, Artificial Sequence
  Description of Artificial Sequence: Synthetic polypeptide
QVQLLESGGGLVKPGGSLRLSCAVSGFSLTAYGVNWVRQAPGKGLEWLGMIWGDGNTDYNSALKSRLTISKDNAKSSVYLQMNSLRAEDTAVYYCARDRVTATLYAMDYWGQGTLVTVSS

SEQ ID NO: 3080 - protein, 120 aa, Artificial Sequence
  Description of Artificial Sequence: Synthetic polypeptide
QVQLVESGGGVVQPGRSLRLSCAVSGFSLTAYGVNWVRQAPGKGLEWLGMIWGDGNTDYNSALKSRLTISKDNSKSTVYLQMNSLRAEDTAVYYCARDRVTATLYAMDYWGQGTLVTVSS

SEQ ID NO: 3081 - protein, 120 aa, Artificial Sequence
  Description of Artificial Sequence: Synthetic polypeptide
QVQLVESGGGVVQPGRSLRLSCAVSGFSLTAYGVNWVRQAPGKGLEWLGMIWGDGNTDYNSALKSRLTISKDNSKSRVYLQMNSLRAEDTAVYYCARDRVTATLYAMDYWGQGTLVTVSS

SEQ ID NO: 3082 - protein, 120 aa, Artificial Sequence
  Description of Artificial Sequence: Synthetic polypeptide
QVQLVESGGGVVQPGRSLRLSCAVSGFSLTAYGVNWVRQAPGKGLEWLGMIWGDGNTDYNSALKSRLAISKDNSKSTVYLQMNSLRAEDTAVYYCARDRVTATLYAMDYWGQGTLVTVSS

SEQ ID NO: 3083 - protein, 120 aa, Artificial Sequence
  Description of Artificial Sequence: Synthetic polypeptide
QVQLVESGGGVVQPGGSLRLSCAVSGFSLTAYGVNWVRQAPGKGLEWLGMIWGDGNTDYNSALKSRLTISKDNSKSTVYLQMNSLRAEDTAVYYCARDRVTATLYAMDYWGQGTLVTVSS

SEQ ID NO: 3084 - protein, 120 aa, Artificial Sequence
  Description of Artificial Sequence: Synthetic polypeptide
EVQLVESGGGLVQPGGSLRLSCAVSGFSLTAYGVNWVRQAPGKGLEWLGMIWGDGNTDYNSALKSRLTISKDNAKSTVYLQMNSLRAEDTAVYYCARDRVTATLYAMDYWGQGTLVTVSS

SEQ ID NO: 3085 - protein, 120 aa, Artificial Sequence
  Description of Artificial Sequence: Synthetic polypeptide
EVQLVESGGGLVQPGGSLRLSCAVSGFSLTAYGVNWVRQAPGKGLEWLGMIWGDGNTDYNSALKSRLTISKDNAKSSVYLQMNSLRAEDTAVYYCARDRVTATLYAMDYWGQGTLVTVSS

SEQ ID NO: 3086 - protein, 120 aa, Artificial Sequence
  Description of Artificial Sequence: Synthetic polypeptide
EVQLVESGGVVVQPGGSLRLSCAVSGFSLTAYGVNWVRQAPGKGLEWLGMIWGDGNTDYNSALKSRLTISKDNSKSSVYLQMNSLRTEDTALYYCARDRVTATLYAMDYWGQGTLVTVSS

SEQ ID NO: 3087 - protein, 120 aa, Artificial Sequence
  Description of Artificial Sequence: Synthetic polypeptide
EVQLVESGGGLVQPGGSLRLSCAVSGFSLTAYGVNWVRQAPGKGLEWLGMIWGDGNTDYNSALKSRLTISKHNSKSTVYLQMNSLRAEDTAVYYCARDRVTATLYAMDYWGQGTLVTVSS

SEQ ID NO: 3088 - protein, 120 aa, Artificial Sequence
  Description of Artificial Sequence: Synthetic polypeptide
EVQLVESGGGLVKPGGSLRLSCAVSGFSLTAYGVNWVRQAPGKGLEWLGMIWGDGNTDYNSALKSRLTISKDNAKSSVYLQMNSLRAEDTAVYYCARDRVTATLYAMDYWGQGTLVTVSS

SEQ ID NO: 3089 - protein, 120 aa, Artificial Sequence
  Description of Artificial Sequence: Synthetic polypeptide
EVQLVESGGGLIQPGGSLRLSCAVSGFSLTAYGVNWVRQPPGKGLEWLGMIWGDGNTDYNSALKSRLTISKDNSKSTVYLQMNSLRAEDTAVYYCARDRVTATLYAMDYWGQGTLVTVSS

SEQ ID NO: 3090 - skipped

SEQ ID NO: 3091 - protein, 119 aa, Artificial Sequence
  Description of Artificial Sequence: Synthetic polypeptide
QVQLQQSGPELVKPGASVKISCKASGYAFSSSWMNWVKQRPGQGLEWIGRIYPGDGDTKYNGKFKGKATLTADKSSSTAYMHLSSLTSVDSAVYFCARRGTGGWYFDVWGAGTTVTVSS

SEQ ID NO: 3092 - protein, 390 aa, Homo sapiens
MPPSGLRLLLLLLPLLWLLVLTPGRPAAGLSTCKTIDMELVKRKRIEAIRGQILSKLRLASPPSQGEVPPGPLPEAVLALYNSTRDRVAGESAEPEPEPEADYYAKEVTRVLMVETHNEIYDKFKQSTHSIYMFFNTSELREAVPEPVLLSRAELRLLRLKLKVEQHVELYQKYSNNSWRYLSNRLLAPSDSPEWLSFDVTGVVRQWLSRGGEIEGFRLSAHCSCDSRDNTLQVDINGFTTGRRGDLATIHGMNRPFLLLMATPLERAQHLQSSRHRRALDTNYCFSSTEKNCCVRQLYIDFRKDLGWKWIHEPKGYHANFCLGPCPYIWSLDTQYSKVLALYNQHNPGASAAPCCVPQALEPLPIVYYVGRKPKVEQLSNMIVRSCKCS

SEQ ID NO: 3093 - protein, 414 aa, Homo sapiens
MHYCVLSAFLILHLVTVALSLSTCSTLDMDQFMRKRIEAIRGQILSKLKLTSPPEDYPEPEEVPPEVISIYNSTRDLLQEKASRRAAACERERSDEEYYAKEVYKIDMPPFFPSENAIPPTFYRPYFRIVRFDVSAMEKNASNLVKAEFRVFRLQNPKARVPEQRIELYQILKSKDLTSPTQRYIDSKVVKTRAEGEWLSFDVTDAVHEWLHHKDRNLGFKISLHCPCCTFVPSNNYIIPNKSEELEARFAGIDGTSTYTSGDQKTIKSTRKKNSGKTPHLLLMLLPSYRLESQQTNRRKKRALDAAYCFRNVQDNCCLRPLYIDFKRDLGWKWIHEPKGYNANFCAGACPYLWSSDTQHSRVLSLYNTINPEASASPCCVSQDLEPLTILYYIGKTPKIEQLSNMIVKSCKCS

SEQ ID NO: 3094 - protein, 412 aa, Homo sapiens
MKMHLQRALVVLALLNFATVSLSLSTCTTLDFGHIKKKRVEAIRGQILSKLRLTSPPEPTVMTHVPYQVLALYNSTRELLEEMHGEREEGCTQENTESEYYAKEIHKFDMIQGLAEHNELAVCPKGITSKVFRFNVSSVEKNRTNLFRAEFRVLRVPNPSSKRNEQRIELFQILRPDEHIAKQRYIGGKNLPTRGTAEWLSFDVTDTVREWLLRRESNLGLEISIHCPCHTFQPNGDILENIHEVMEIKFKGVDNEDDHGRGDLGRLKKQKDHHNPHLILMMIPPHRLDNPGQGGQRKKRALDTNYCFRNLEENCCVRPLYIDFRQDLGWKWVHEPKGYYANFCSGPCPYLRSADTTHSTVLGLYNTLNPEASASPCCVPQDLEPLTILYYVGRTPKVEQLSNMVVKSCKCS

SEQ ID NO: 3095 - protein, 503 aa, Homo sapiens
MEAAVAAPRPRLLLLVLAAAAAAAAALLPGATALQCFCHLCTKDNFTCVTDGLCFVSVTETTDKVIHNSMCIAEIDLIPRDRPFVCAPSSKTGSVTTTYCCNQDHCNKIELPTTVKSSPGLGPVELAAVIAGPVCFVCISLMLMVYICHNRTVIHHRVPNEEDPSLDRPFISEGTTLKDLIYDMTTSGSGSGLPLLVQRTIARTIVLQESIGKGRFGEVWRGKWRGEEVAVKIFSSREERSWFREAEIYQTVMLRHENILGFIAADNKDNGTWTQLWLVSDYHEHGSLFDYLNRYTVTVEGMIKLALSTASGLAHLHMEIVGTQGKPAIAHRDLKSKNILVKKNGTCCIADLGLAVRHDSATDTIDIAPNHRVGTKRYMAPEVLDDSINMKHFESFKRADIYAMGLVFWEIARRCSIGGIHEDYQLPYYDLVPSDPSVEEMRKVVCEQKLRPNIPNRWQSCEALRVMAKIMRECWYANGAARLTALRIKKTLSQLSQQEGIKM

SEQ ID NO: 3096 - protein, 507 aa, Homo sapiens
MEAAVAAPRPRLLLLVLAAAAAAAAALLPGATALQCFCHLCTKDNFTCVTDGLCFVSVTETTDKVIHNSMCIAEIDLIPRDRPFVCAPSSKTGSVTTTYCCNQDHCNKIELPTTGPFSVKSSPGLGPVELAAVIAGPVCFVCISLMLMVYICHNRTVIHHRVPNEEDPSLDRPFISEGTTLKDLIYDMTTSGSGSGLPLLVQRTIARTIVLQESIGKGRFGEVWRGKWRGEEVAVKIFSSREERSWFREAEIYQTVMLRHENILGFIAADNKDNGTWTQLWLVSDYHEHGSLFDYLNRYTVTVEGMIKLALSTASGLAHLHMEIVGTQGKPAIAHRDLKSKNILVKKNGTCCIADLGLAVRHDSATDTIDIAPNHRVGTKRYMAPEVLDDSINMKHFESFKRADIYAMGLVFWEIARRCSIGGIHEDYQLPYYDLVPSDPSVEEMRKVVCEQKLRPNIPNRWQSCEALRVMAKIMRECWYANGAARLTALRIKKTLSQLSQQEGIKM

SEQ ID NO: 3097 - protein, 426 aa, Homo sapiens
MEAAVAAPRPRLLLLVLAAAAAAAAALLPGATALQCFCHLCTKDNFTCVTDGLCFVSVTETTDKVIHNSMCIAEIDLIPRDRPFVCAPSSKTGSVTTTYCCNQDHCNKIELPTTGLPLLVQRTIARTIVLQESIGKGRFGEVWRGKWRGEEVAVKIFSSREERSWFREAEIYQTVMLRHENILGFIAADNKDNGTWTQLWLVSDYHEHGSLFDYLNRYTVTVEGMIKLALSTASGLAHLHMEIVGTQGKPAIAHRDLKSKNILVKKNGTCCIADLGLAVRHDSATDTIDIAPNHRVGTKRYMAPEVLDDSINMKHFESFKRADIYAMGLVFWEIARRCSIGGIHEDYQLPYYDLVPSDPSVEEMRKVVCEQKLRPNIPNRWQSCEALRVMAKIMRECWYANGAARLTALRIKKTLSQLSQQEGIKM

SEQ ID NO: 3098 - protein, 567 aa, Homo sapiens
MGRGLLRGLWPLHIVLWTRIASTIPPHVQKSVNNDMIVTDNNGAVKFPQLCKFCDVRFSTCDNQKSCMSNCSITSICEKPQEVCVAVWRKNDENITLETVCHDPKLPYHDFILEDAASPKCIMKEKKKPGETFFMCSCSSDECNDNIIFSEEYNTSNPDLLLVIFQVTGISLLPPLGVAISVIIIFYCYRVNRQQKLSSTWETGKTRKLMEFSEHCAIILEDDRSDISSTCANNINHNTELLPIELDTLVGKGRFAEVYKAKLKQNTSEQFETVAVKIFPYEEYASWKTEKDIFSDINLKHENILQFLTAEERKTELGKQYWLITAFHAKGNLQEYLTRHVISWEDLRKLGSSLARGIAHLHSDHTPCGRPKMPIVHRDLKSSNILVKNDLTCCLCDFGLSLRLDPTLSVDDLANSGQVGTARYMAPEVLESRMNLENVESFKQTDVYSMALVLWEMTSRCNAVGEVKDYEPPFGSKVREHPCVESMKDNVLRDRGRPEIPSFWLNHQGIQMVCETLTECWDHDPEARLTAQCVAERFSELEHLDRLSGRSCSEEKIPEDGSLNTTK

SEQ ID NO: 3099 - protein, 592 aa, Homo sapiens
MGRGLLRGLWPLHIVLWTRIASTIPPHVQKSDVEMEAQKDEIICPSCNRTAHPLRHINNDMIVTDNNGAVKFPQLCKFCDVRFSTCDNQKSCMSNCSITSICEKPQEVCVAVWRKNDENITLETVCHDPKLPYHDFILEDAASPKCIMKEKKKPGETFFMCSCSSDECNDNIIFSEEYNTSNPDLLLVIFQVTGISLLPPLGVAISVIIIFYCYRVNRQQKLSSTWETGKTRKLMEFSEHCAIILEDDRSDISSTCANNINHNTELLPIELDTLVGKGRFAEVYKAKLKQNTSEQFETVAVKIFPYEEYASWKTEKDIFSDINLKHENILQFLTAEERKTELGKQYWLITAFHAKGNLQEYLTRHVISWEDLRKLGSSLARGIAHLHSDHTPCGRPKMPIVHRDLKSSNILVKNDLTCCLCDFGLSLRLDPTLSVDDLANSGQVGTARYMAPEVLESRMNLENVESFKQTDVYSMALVLWEMTSRCNAVGEVKDYEPPFGSKVREHPCVESMKDNVLRDRGRPEIPSFWLNHQGIQMVCETLTECWDHDPEARLTAQCVAERFSELEHLDRLSGRSCSEEKIPEDGSLNTTK

SEQ ID NO: 3100 - protein, 137 aa, Homo sapiens
TIPPHVQKSVNNDMIVTDNNGAVKFPQLCKFCDVRFSTCDNQKSCMSNCSITSICEKPQEVCVAVWRKNDENITLETVCHDPKLPYHDFILEDAASPKCIMKEKKKPGETFFMCSCSSDECNDNIIFSEEYNTSNPD

SEQ ID NO: 3101 - protein, 136 aa, Homo sapiens
IPPHVQKSVNNDMIVTDNNGAVKFPQLCKFCDVRFSTCDNQKSCMSNCSITSICEKPQEVCVAVWRKNDENITLETVCHDPKLPYHDFILEDAASPKCIMKEKKKPGETFFMCSCSSDECNDNIIFSEEYNTSNPD

SEQ ID NO: 3102 - protein, 162 aa, Homo sapiens
TIPPHVQKSDVEMEAQKDEIICPSCNRTAHPLRHINNDMIVTDNNGAVKFPQLCKFCDVRFSTCDNQKSCMSNCSITSICEKPQEVCVAVWRKNDENITLETVCHDPKLPYHDFILEDAASPKCIMKEKKKPGETFFMCSCSSDECNDNIIFSEEYNTSNPD

SEQ ID NO: 3103 - protein, 101 aa, Homo sapiens
QLCKFCDVRFSTCDNQKSCMSNCSITSICEKPQEVCVAVWRKNDENITLETVCHDPKLPYHDFILEDAASPKCIMKEKKKPGETFFMCSCSSDECNDNIIF

SEQ ID NO: 3104 - protein, 93 aa, Homo sapiens
LQCFCHLCTKDNFTCVTDGLCFVSVTETTDKVIHNSMCIAEIDLIPRDRPFVCAPSSKTGSVTTTYCCNQDHCNKIELPTTVKSSPGLGPVEL

SEQ ID NO: 3105 - protein, 79 aa, Homo sapiens
ALQCFCHLCTKDNFTCVTDGLCFVSVTETTDKVIHNSMCIAEIDLIPRDRPFVCAPSSKTGSVTTTYCCNQDHCNKIEL

SEQ ID NO: 3106 - protein, 851 aa, Homo sapiens
MTSHYVIAIFALMSSCLATAGPEPGALCELSPVSASHPVQALMESFTVLSGCASRGTTGLPQEVHVLNLRTAGQGPGQLQREVTLHLNPISSVHIHHKSVVFLLNSPHPLVWHLKTERLATGVSRLFLVSEGSVVQFSSANFSLTAETEERNFPHGNEHLLNWARKEYGAVTSFTELKIARNIYIKVGEDQVFPPKCNIGKNFLSLNYLAEYLQPKAAEGCVMSSQPQNEEVHIIELITPNSNPYSAFQVDITIDIRPSQEDLEVVKNLILILKCKKSVNWVIKSFDVKGSLKIIAPNSIGFGKESERSMTMTKSIRDDIPSTQGNLVKWALDNGYSPITSYTMAPVANRFHLRLENNAEEMGDEEVHTIPPELRILLDPGALPALQNPPIRGGEGQNGGLPFPFPDISRRVWNEEGEDGLPRPKDPVIPSIQLFPGLREPEEVQGSVDIALSVKCDNEKMIVAVEKDSFQASGYSGMDVTLLDPTCKAKMNGTHFVLESPLNGCGTRPRWSALDGVVYYNSIVIQVPALGDSSGWPDGYEDLESGDNGFPGDMDEGDASLFTRPEIVVFNCSLQQVRNPSSFQEQPHGNITFNMELYNTDLFLVPSQGVFSVPENGHVYVEVSVTKAEQELGFAIQTCFISPYSNPDRMSHYTIIENICPKDESVKFYSPKRVHFPIPQADMDKKRFSFVFKPVFNTSLLFLQCELTLCTKMEKHPQKLPKCVPPDEACTSLDASIIWAMMQNKKTFTKPLAVIHHEAESKEKGPSMKEPNPISPPIFHGLDTLTVMGIAFAAFVIGALLTGALWYIYSHTGETAGRQQVPTSPPASENSSAAHSIGSTQSTPCSSSSTA

SEQ ID NO: 3107 - protein, 850 aa, Homo sapiens
MTSHYVIAIFALMSSCLATAGPEPGALCELSPVSASHPVQALMESFTVLSGCASRGTTGLPQEVHVLNLRTAGQGPGQLQREVTLHLNPISSVHIHHKSVVFLLNSPHPLVWHLKTERLATGVSRLFLVSEGSVVQFSSANFSLTAETEERNFPHGNEHLLNWARKEYGAVTSFTELKIARNIYIKVGEDQVFPPKCNIGKNFLSLNYLAEYLQPKAAEGCVMSSQPQNEEVHIIELITPNSNPYSAFQVDITIDIRPSQEDLEVVKNLILILKCKKSVNWVIKSFDVKGSLKIIAPNSIGFGKESERSMTMTKSIRDDIPSTQGNLVKWALDNGYSPITSYTMAPVANRFHLRLENNEEMGDEEVHTIPPELRILLDPGALPALQNPPIRGGEGQNGGLPFPFPDISRRVWNEEGEDGLPRPKDPVIPSIQLFPGLREPEEVQGSVDIALSVKCDNEKMIVAVEKDSFQASGYSGMDVTLLDPTCKAKMNGTHFVLESPLNGCGTRPRWSALDGVVYYNSIVIQVPALGDSSGWPDGYEDLESGDNGFPGDMDEGDASLFTRPEIVVFNCSLQQVRNPSSFQEQPHGNITFNMELYNTDLFLVPSQGVFSVPENGHVYVEVSVTKAEQELGFAIQTCFISPYSNPDRMSHYTIIENICPKDESVKFYSPKRVHFPIPQADMDKKRFSFVFKPVFNTSLLFLQCELTLCTKMEKHPQKLPKCVPPDEACTSLDASIIWAMMQNKKTFTKPLAVIHHEAESKEKGPSMKEPNPISPPIFHGLDTLTVMGIAFAAFVIGALLTGALWYIYSHTGETAGRQQVPTSPPASENSSAAHSIGSTQSTPCSSSSTA

SEQ ID NO: 3108 - protein, 767 aa, Homo sapiens
GPEPGALCELSPVSASHPVQALMESFTVLSGCASRGTTGLPQEVHVLNLRTAGQGPGQLQREVTLHLNPISSVHIHHKSVVFLLNSPHPLVWHLKTERLATGVSRLFLVSEGSVVQFSSANFSLTAETEERNFPHGNEHLLNWARKEYGAVTSFTELKIARNIYIKVGEDQVFPPKCNIGKNFLSLNYLAEYLQPKAAEGCVMSSQPQNEEVHIIELITPNSNPYSAFQVDITIDIRPSQEDLEVVKNLILILKCKKSVNWVIKSFDVKGSLKIIAPNSIGFGKESERSMTMTKSIRDDIPSTQGNLVKWALDNGYSPITSYTMAPVANRFHLRLENNAEEMGDEEVHTIPPELRILLDPGALPALQNPPIRGGEGQNGGLPFPFPDISRRVWNEEGEDGLPRPKDPVIPSIQLFPGLREPEEVQGSVDIALSVKCDNEKMIVAVEKDSFQASGYSGMDVTLLDPTCKAKMNGTHFVLESPLNGCGTRPRWSALDGVVYYNSIVIQVPALGDSSGWPDGYEDLESGDNGFPGDMDEGDASLFTRPEIVVFNCSLQQVRNPSSFQEQPHGNITFNMELYNTDLFLVPSQGVFSVPENGHVYVEVSVTKAEQELGFAIQTCFISPYSNPDRMSHYTIIENICPKDESVKFYSPKRVHFPIPQADMDKKRFSFVFKPVFNTSLLFLQCELTLCTKMEKHPQKLPKCVPPDEACTSLDASIIWAMMQNKKTFTKPLAVIHHEAESKEKGPSMKEPNPISPPIFHGLDTLTV

SEQ ID NO: 3109 - protein, 111 aa, Artificial Sequence
  Description of Artificial Sequence: Synthetic polypeptide
EIVLTQSPATLSVSPGERATLSCRASESVDSSGNSFMHWYQQKPGQAPQLLIYRASNLESGIPARFSGSGSRTEFTLTISILQSEDFAVYYCQQSFDDPFTFGQGTKLEIK

SEQ ID NO: 3110 - protein, 111 aa, Artificial Sequence
  Description of Artificial Sequence: Synthetic polypeptide
EIVLTQSPATLSVSPGERATLSCRASESVDSSGNSFMHWYQQKPGQAPQLLIYRASNLESGIPARFSGSGSRTEFTLTISSLQSEDFAVYYCQQSFDDPFTFGQGTKLEIK

SEQ ID NO: 3111 - protein, 111 aa, Artificial Sequence
  Description of Artificial Sequence: Synthetic polypeptide
AIRLTQSPFSLSASVGDRVTITCRASESVDSSGNSFMHWYQQKPAKAPQLFIYRASNLESGVPSRFSGSGSRTDFTLTISSLQPEDFATYYCQQSFDDPFTFGQGTKLEIK

SEQ ID NO: 3112 - protein, 111 aa, Artificial Sequence
  Description of Artificial Sequence: Synthetic polypeptide
DIQLTQSPSSLSASVGDRVTITCRASESVDSSGNSFMHWYQQKPGKAPQSLIYRASNLESGVPSRFSGSGSRTDFTLTISSLQPEDFATYYCQQSFDDPFTFGQGTKLEIK

SEQ ID NO: 3113 - protein, 111 aa, Artificial Sequence
  Description of Artificial Sequence: Synthetic polypeptide
DIQLTQSPSSLSASVGDRVTITCRASESVDSSGNSFMHWYQQKPGKAPQRLIYRASNLESGVPSRFSGSGSRTEFTLTISNLQPEDFATYYCQQSFDDPFTFGQGTKLEIK

SEQ ID NO: 3114 - protein, 111 aa, Artificial Sequence
  Description of Artificial Sequence: Synthetic polypeptide
DIQLTQSPSTLSASVGDRVTITCRASESVDSSGNSFMHWYQQKPGKAPQLLIYRASNLESGVPSRFSGSGSRTEFTLTISSLQPDDFATYYCQQSFDDPFTFGQGTKLEIK

SEQ ID NO: 3115 - protein, 111 aa, Artificial Sequence
  Description of Artificial Sequence: Synthetic polypeptide
EIVLTQSPDFQSVTPKEKVTITCRASESVDSSGNSFMHWYQQKPDQSPQLLIYRASNLESGVPSRFSGSGSRTDFTLTINSLEAEDAATYYCQQSFDDPFTFGQGTKLEIK

SEQ ID NO: 3116 - protein, 111 aa, Artificial Sequence
  Description of Artificial Sequence: Synthetic polypeptide
DIQLTQSPSSLSASVGDRVTITCRASESVDSSGNSFMHWYQQKPGKAPQSLIYRASNLESGVPSKFSGSGSRTDFTLTISSLQPEDFATYYCQQSFDDPFTFGQGTKLEIK

SEQ ID NO: 3117 - protein, 361 aa, Homo sapiens
LSTCKTIDMELVKRKRIEAIRGQILSKLRLASPPSQGEVPPGPLPEAVLALYNSTRDRVAGESAEPEPEPEADYYAKEVTRVLMVETHNEIYDKFKQSTHSIYMFFNTSELREAVPEPVLLSRAELRLLRLKLKVEQHVELYQKYSNNSWRYLSNRLLAPSDSPEWLSFDVTGVVRQWLSRGGEIEGFRLSAHCSCDSRDNTLQVDINGFTTGRRGDLATIHGMNRPFLLLMATPLERAQHLQSSRHRRALDTNYCFSSTEKNCCVRQLYIDFRKDLGWKWIHEPKGYHANFCLGPCPYIWSLDTQYSKVLALYNQHNPGASAAPCCVPQALEPLPIVYYVGRKPKVEQLSNMIVRSCKCS

SEQ ID NO: 3118 - protein, 394 aa, Homo sapiens
LSTCSTLDMDQFMRKRIEAIRGQILSKLKLTSPPEDYPEPEEVPPEVISIYNSTRDLLQEKASRRAAACERERSDEEYYAKEVYKIDMPPFFPSENAIPPTFYRPYFRIVRFDVSAMEKNASNLVKAEFRVFRLQNPKARVPEQRIELYQILKSKDLTSPTQRYIDSKVVKTRAEGEWLSFDVTDAVHEWLHHKDRNLGFKISLHCPCCTFVPSNNYIIPNKSEELEARFAGIDGTSTYTSGDQKTIKSTRKKNSGKTPHLLLMLLPSYRLESQQTNRRKKRALDAAYCFRNVQDNCCLRPLYIDFKRDLGWKWIHEPKGYNANFCAGACPYLWSSDTQHSRVLSLYNTINPEASASPCCVSQDLEPLTILYYIGKTPKIEQLSNMIVKSCKCS

SEQ ID NO: 3119 - protein, 389 aa, Homo sapiens
LSTCTTLDFGHIKKKRVEAIRGQILSKLRLTSPPEPTVMTHVPYQVLALYNSTRELLEEMHGEREEGCTQENTESEYYAKEIHKFDMIQGLAEHNELAVCPKGITSKVFRFNVSSVEKNRTNLFRAEFRVLRVPNPSSKRNEQRIELFQILRPDEHIAKQRYIGGKNLPTRGTAEWLSFDVTDTVREWLLRRESNLGLEISIHCPCHTFQPNGDILENIHEVMEIKFKGVDNEDDHGRGDLGRLKKQKDHHNPHLILMMIPPHRLDNPGQGGQRKKRALDTNYCFRNLEENCCVRPLYIDFRQDLGWKWVHEPKGYYANFCSGPCPYLRSADTTHSTVLGLYNTLNPEASASPCCVPQDLEPLTILYYVGRTPKVEQLSNMVVKSCKCS

SEQ ID NO: 3120 - protein, 470 aa, Homo sapiens
LQCFCHLCTKDNFTCVTDGLCFVSVTETTDKVIHNSMCIAEIDLIPRDRPFVCAPSSKTGSVTTTYCCNQDHCNKIELPTTVKSSPGLGPVELAAVIAGPVCFVCISLMLMVYICHNRTVIHHRVPNEEDPSLDRPFISEGTTLKDLIYDMTTSGSGSGLPLLVQRTIARTIVLQESIGKGRFGEVWRGKWRGEEVAVKIFSSREERSWFREAEIYQTVMLRHENILGFIAADNKDNGTWTQLWLVSDYHEHGSLFDYLNRYTVTVEGMIKLALSTASGLAHLHMEIVGTQGKPAIAHRDLKSKNILVKKNGTCCIADLGLAVRHDSATDTIDIAPNHRVGTKRYMAPEVLDDSINMKHFESFKRADIYAMGLVFWEIARRCSIGGIHEDYQLPYYDLVPSDPSVEEMRKVVCEQKLRPNIPNRWQSCEALRVMAKIMRECWYANGAARLTALRIKKTLSQLSQQEGIKM

SEQ ID NO: 3121 - protein, 474 aa, Homo sapiens
LQCFCHLCTKDNFTCVTDGLCFVSVTETTDKVIHNSMCIAEIDLIPRDRPFVCAPSSKTGSVTTTYCCNQDHCNKIELPTTGPFSVKSSPGLGPVELAAVIAGPVCFVCISLMLMVYICHNRTVIHHRVPNEEDPSLDRPFISEGTTLKDLIYDMTTSGSGSGLPLLVQRTIARTIVLQESIGKGRFGEVWRGKWRGEEVAVKIFSSREERSWFREAEIYQTVMLRHENILGFIAADNKDNGTWTQLWLVSDYHEHGSLFDYLNRYTVTVEGMIKLALSTASGLAHLHMEIVGTQGKPAIAHRDLKSKNILVKKNGTCCIADLGLAVRHDSATDTIDIAPNHRVGTKRYMAPEVLDDSINMKHFESFKRADIYAMGLVFWEIARRCSIGGIHEDYQLPYYDLVPSDPSVEEMRKVVCEQKLRPNIPNRWQSCEALRVMAKIMRECWYANGAARLTALRIKKTLSQLSQQEGIKM

SEQ ID NO: 3122 - protein, 393 aa, Homo sapiens
LQCFCHLCTKDNFTCVTDGLCFVSVTETTDKVIHNSMCIAEIDLIPRDRPFVCAPSSKTGSVTTTYCCNQDHCNKIELPTTGLPLLVQRTIARTIVLQESIGKGRFGEVWRGKWRGEEVAVKIFSSREERSWFREAEIYQTVMLRHENILGFIAADNKDNGTWTQLWLVSDYHEHGSLFDYLNRYTVTVEGMIKLALSTASGLAHLHMEIVGTQGKPAIAHRDLKSKNILVKKNGTCCIADLGLAVRHDSATDTIDIAPNHRVGTKRYMAPEVLDDSINMKHFESFKRADIYAMGLVFWEIARRCSIGGIHEDYQLPYYDLVPSDPSVEEMRKVVCEQKLRPNIPNRWQSCEALRVMAKIMRECWYANGAARLTALRIKKTLSQLSQQEGIKM

SEQ ID NO: 3123 - protein, 545 aa, Homo sapiens
TIPPHVQKSVNNDMIVTDNNGAVKFPQLCKFCDVRFSTCDNQKSCMSNCSITSICEKPQEVCVAVWRKNDENITLETVCHDPKLPYHDFILEDAASPKCIMKEKKKPGETFFMCSCSSDECNDNIIFSEEYNTSNPDLLLVIFQVTGISLLPPLGVAISVIIIFYCYRVNRQQKLSSTWETGKTRKLMEFSEHCAIILEDDRSDISSTCANNINHNTELLPIELDTLVGKGRFAEVYKAKLKQNTSEQFETVAVKIFPYEEYASWKTEKDIFSDINLKHENILQFLTAEERKTELGKQYWLITAFHAKGNLQEYLTRHVISWEDLRKLGSSLARGIAHLHSDHTPCGRPKMPIVHRDLKSSNILVKNDLTCCLCDFGLSLRLDPTLSVDDLANSGQVGTARYMAPEVLESRMNLENVESFKQTDVYSMALVLWEMTSRCNAVGEVKDYEPPFGSKVREHPCVESMKDNVLRDRGRPEIPSFWLNHQGIQMVCETLTECWDHDPEARLTAQCVAERFSELEHLDRLSGRSCSEEKIPEDGSLNTTK

SEQ ID NO: 3124 - protein, 570 aa, Homo sapiens
TIPPHVQKSDVEMEAQKDEIICPSCNRTAHPLRHINNDMIVTDNNGAVKFPQLCKFCDVRFSTCDNQKSCMSNCSITSICEKPQEVCVAVWRKNDENITLETVCHDPKLPYHDFILEDAASPKCIMKEKKKPGETFFMCSCSSDECNDNIIFSEEYNTSNPDLLLVIFQVTGISLLPPLGVAISVIIIFYCYRVNRQQKLSSTWETGKTRKLMEFSEHCAIILEDDRSDISSTCANNINHNTELLPIELDTLVGKGRFAEVYKAKLKQNTSEQFETVAVKIFPYEEYASWKTEKDIFSDINLKHENILQFLTAEERKTELGKQYWLITAFHAKGNLQEYLTRHVISWEDLRKLGSSLARGIAHLHSDHTPCGRPKMPIVHRDLKSSNILVKNDLTCCLCDFGLSLRLDPTLSVDDLANSGQVGTARYMAPEVLESRMNLENVESFKQTDVYSMALVLWEMTSRCNAVGEVKDYEPPFGSKVREHPCVESMKDNVLRDRGRPEIPSFWLNHQGIQMVCETLTECWDHDPEARLTAQCVAERFSELEHLDRLSGRSCSEEKIPEDGSLNTTK

SEQ ID NO: 3125 - protein, 831 aa, Homo sapiens
GPEPGALCELSPVSASHPVQALMESFTVLSGCASRGTTGLPQEVHVLNLRTAGQGPGQLQREVTLHLNPISSVHIHHKSVVFLLNSPHPLVWHLKTERLATGVSRLFLVSEGSVVQFSSANFSLTAETEERNFPHGNEHLLNWARKEYGAVTSFTELKIARNIYIKVGEDQVFPPKCNIGKNFLSLNYLAEYLQPKAAEGCVMSSQPQNEEVHIIELITPNSNPYSAFQVDITIDIRPSQEDLEVVKNLILILKCKKSVNWVIKSFDVKGSLKIIAPNSIGFGKESERSMTMTKSIRDDIPSTQGNLVKWALDNGYSPITSYTMAPVANRFHLRLENNAEEMGDEEVHTIPPELRILLDPGALPALQNPPIRGGEGQNGGLPFPFPDISRRVWNEEGEDGLPRPKDPVIPSIQLFPGLREPEEVQGSVDIALSVKCDNEKMIVAVEKDSFQASGYSGMDVTLLDPTCKAKMNGTHFVLESPLNGCGTRPRWSALDGVVYYNSIVIQVPALGDSSGWPDGYEDLESGDNGFPGDMDEGDASLFTRPEIVVFNCSLQQVRNPSSFQEQPHGNITFNMELYNTDLFLVPSQGVFSVPENGHVYVEVSVTKAEQELGFAIQTCFISPYSNPDRMSHYTIIENICPKDESVKFYSPKRVHFPIPQADMDKKRFSFVFKPVFNTSLLFLQCELTLCTKMEKHPQKLPKCVPPDEACTSLDASIIWAMMQNKKTFTKPLAVIHHEAESKEKGPSMKEPNPISPPIFHGLDTLTVMGIAFAAFVIGALLTGALWYIYSHTGETAGRQQVPTSPPASENSSAAHSIGSTQSTPCSSSSTA

SEQ ID NO: 3126 - protein, 830 aa, Homo sapiens
GPEPGALCELSPVSASHPVQALMESFTVLSGCASRGTTGLPQEVHVLNLRTAGQGPGQLQREVTLHLNPISSVHIHHKSVVFLLNSPHPLVWHLKTERLATGVSRLFLVSEGSVVQFSSANFSLTAETEERNFPHGNEHLLNWARKEYGAVTSFTELKIARNIYIKVGEDQVFPPKCNIGKNFLSLNYLAEYLQPKAAEGCVMSSQPQNEEVHIIELITPNSNPYSAFQVDITIDIRPSQEDLEVVKNLILILKCKKSVNWVIKSFDVKGSLKIIAPNSIGFGKESERSMTMTKSIRDDIPSTQGNLVKWALDNGYSPITSYTMAPVANRFHLRLENNEEMGDEEVHTIPPELRILLDPGALPALQNPPIRGGEGQNGGLPFPFPDISRRVWNEEGEDGLPRPKDPVIPSIQLFPGLREPEEVQGSVDIALSVKCDNEKMIVAVEKDSFQASGYSGMDVTLLDPTCKAKMNGTHFVLESPLNGCGTRPRWSALDGVVYYNSIVIQVPALGDSSGWPDGYEDLESGDNGFPGDMDEGDASLFTRPEIVVFNCSLQQVRNPSSFQEQPHGNITFNMELYNTDLFLVPSQGVFSVPENGHVYVEVSVTKAEQELGFAIQTCFISPYSNPDRMSHYTIIENICPKDESVKFYSPKRVHFPIPQADMDKKRFSFVFKPVFNTSLLFLQCELTLCTKMEKHPQKLPKCVPPDEACTSLDASIIWAMMQNKKTFTKPLAVIHHEAESKEKGPSMKEPNPISPPIFHGLDTLTVMGIAFAAFVIGALLTGALWYIYSHTGETAGRQQVPTSPPASENSSAAHSIGSTQSTPCSSSSTA

SEQ ID NO: 3127 - protein, 111 aa, Artificial Sequence
  Description of Artificial Sequence: Synthetic polypeptide
DIVLTQTPLSSPVTLGQPASISCRASESVDSSGNSFMHWYQQRPGQPPQLLIYRASNLESGVPDRFSGSGARTDFTLKISRVEAEDVGVYYCQQSFDDPFTFGQGTKLEIK

SEQ ID NO: 3128 - protein, 111 aa, Artificial Sequence
  Description of Artificial Sequence: Synthetic polypeptide
DIVLTQSPAFLSVTPGEKVTITCRASESVDSSGNSFMHWYQQKPDQAPQLLIYRASNLESGVPSRFSGSGSRTDFTFTISSLEAEDAATYYCQQSFDDPFTFGQGTKLEIK

SEQ ID NO: 3129 - protein, 111 aa, Artificial Sequence
  Description of Artificial Sequence: Synthetic polypeptide
DIQLIQSPSFLSASVGDRVSIICRASESVDSSGNSFMHWYLQKPGKSPQLFIYRASNLESGVSSRFSGRGSRTDFTLTIISLKPEDFAAYYCQQSFDDPFTFGQGTKLEIK

SEQ ID NO: 3130 - protein, 111 aa, Artificial Sequence
  Description of Artificial Sequence: Synthetic polypeptide
EIVLTQTPLSLSITPGEQASISCRASESVDSSGNSFMHWYLQKARPVPQLLIYRASNLESGVPDRFSGSGSRTDFTLKISRVEAEDFGVYYCQQSFDDPFTFGQGTKLEIK

SEQ ID NO: 3131 - protein, 111 aa, Artificial Sequence
  Description of Artificial Sequence: Synthetic polypeptide
EIVLTQTPLSLSITPGEQASMSCRASESVDSSGNSFMHWYLQKARPVPQLLIYRASNLESGVPDRFSGSGSRTDFTLKISRVEAEDFGVYYCQQSFDDPFTFGQGTKLEIK

SEQ ID NO: 3132 - protein, 111 aa, Artificial Sequence
  Description of Artificial Sequence: Synthetic polypeptide
EITLTQSPAFMSATPGDKVNISCRASESVDSSGNSFMHWYQQKPGEAPQFIIYRASNLESGIPPRFSGSGYRTDFTLTINNIESEDAAYYYCQQSFDDPFTFGQGTKLEIK

SEQ ID NO: 3133 - protein, 119 aa, Artificial Sequence
  Description of Artificial Sequence: Synthetic polypeptide
QVQLVQSGAEVKKPGASVKVSCKASGYAFSSSWMNWVRQAPGQGLEWIGRIYPGDGDTKYNGKFKGRATLTADKSTSTAYMELSSLRSEDTAVYYCARRGTGGWYFDVWGQGTTVTVSS

SEQ ID NO: 3134 - protein, 119 aa, Artificial Sequence
  Description of Artificial Sequence: Synthetic polypeptide
QVQLVQSGAEVKKPGSSVKVSCKASGYAFSSSWMNWVRQAPGQGLEWIGRIYPGDGDTKYNGKFKGRATLTADKSTSTAYMELSSLRSEDTAVYYCARRGTGGWYFDVWGQGTTVTVSS

SEQ ID NO: 3135 - protein, 119 aa, Artificial Sequence
  Description of Artificial Sequence: Synthetic polypeptide
QVQLVQSGAEVKKPGASVKVSCKASGYAFSSSWMNWVRQAPGKGLEWIGRIYPGDGDTKYNGKFKGRATLTADKSTSTAYMELSSLRSEDTAVYYCARRGTGGWYFDVWGQGTTVTVSS

SEQ ID NO: 3136 - protein, 119 aa, Artificial Sequence
  Description of Artificial Sequence: Synthetic polypeptide
QVQLVQSGAEVKKPGASVKVSCKASGYAFSSSWMNWVRQAPGQELEWIGRIYPGDGDTKYNGKFKGRATLTADKSISTAYMELSSLRSEDTATYYCARRGTGGWYFDVWGQGTTVTVSS

SEQ ID NO: 3137 - protein, 119 aa, Artificial Sequence
  Description of Artificial Sequence: Synthetic polypeptide
EVQLVQSGAEVKKPGATVKISCKASGYAFSSSWMNWVQQAPGKGLEWIGRIYPGDGDTKYNGKFKGRATLTADKSTSTAYMELSSLRSEDTAVYYCARRGTGGWYFDVWGQGTTVTVSS

SEQ ID NO: 3138 - protein, 119 aa, Artificial Sequence
  Description of Artificial Sequence: Synthetic polypeptide
QVQLVQSGAEVKKTGSSVKVSCKASGYAFSSSWMNWVRQAPGQALEWIGRIYPGDGDTKYNGKFKGRATLTADKSMSTAYMELSSLRSEDTAMYYCARRGTGGWYFDVWGQGTTVTVSS

SEQ ID NO: 3139 - protein, 119 aa, Artificial Sequence
  Description of Artificial Sequence: Synthetic polypeptide
QVQLVQSGAEVKKPGASVKVSCKASGYAFSSSWMNWVRQAPGQRLEWIGRIYPGDGDTKYNGKFKGRATLTADKSASTAYMELSSLRSEDMAVYYCARRGTGGWYFDVWGQGTTVTVSS

SEQ ID NO: 3140 - protein, 119 aa, Artificial Sequence
  Description of Artificial Sequence: Synthetic polypeptide
QVQLVQSGAEVKKPGASVKVSCKASGYAFSSSWMNWVRQAPGQGLEWIGRIYPGDGDTKYNGKFKGRATLTADKSTSTAYMELRSLRSDDMAVYYCARRGTGGWYFDVWGQGTTVTVSS

SEQ ID NO: 3141 - protein, 119 aa, Artificial Sequence
  Description of Artificial Sequence: Synthetic polypeptide
QVQLVQSGAEVKKPGASVKVSCKASGYAFSSSWMNWVRQAPGQRLEWIGRIYPGDGDTKYNGKFKGRATLTADKSASTAYMELSSLRSEDTAVYYCARRGTGGWYFDVWGQGTTVTVSS

SEQ ID NO: 3142 - protein, 119 aa, Artificial Sequence
  Description of Artificial Sequence: Synthetic polypeptide
QVQLVQSGAEVKKPGASVKVSCKASGYAFSSSWMNWVRQAPGQGLEWIGRIYPGDGDTKYNGKFKGRATLTADKSTSTAYMELRSLRSDDTAVYYCARRGTGGWYFDVWGQGTTVTVSS

SEQ ID NO: 3143 - protein, 119 aa, Artificial Sequence
  Description of Artificial Sequence: Synthetic polypeptide
QVQLVQSGAEVKKPGASVKVSCKASGYAFSSSWMNWVRQAPGQGLEWIGRIYPGDGDTKYNGKFKGRATLTADKSISTAYMELSRLRSDDTAVYYCARRGTGGWYFDVWGQGTTVTVSS

SEQ ID NO: 3144 - protein, 119 aa, Artificial Sequence
  Description of Artificial Sequence: Synthetic polypeptide
QVQLVQSGAEVKKPGASVKVSCKASGYAFSSSWMNWVRQAPGQGLEWIGRIYPGDGDTKYNGKFKGRATLTADKSISTAYMELSRLRSDDTVVYYCARRGTGGWYFDVWGQGTTVTVSS

SEQ ID NO: 3145 - protein, 119 aa, Artificial Sequence
  Description of Artificial Sequence: Synthetic polypeptide
QVQLVQSGAEVKKPGASVKVSCKASGYAFSSSWMNWVRQAPGQGLEWIGRIYPGDGDTKYNGKFKGWATLTADKSISTAYMELSRLRSDDTAVYYCARRGTGGWYFDVWGQGTTVTVSS

SEQ ID NO: 3146 - protein, 119 aa, Artificial Sequence
  Description of Artificial Sequence: Synthetic polypeptide
QVQLVQSGAEVKKPGASVKVSCKASGYAFSSSWMNWVRQATGQGLEWIGRIYPGDGDTKYNGKFKGRATLTANKSISTAYMELSSLRSEDTAVYYCARRGTGGWYFDVWGQGTTVTVSS

SEQ ID NO: 3147 - protein, 119 aa, Artificial Sequence
  Description of Artificial Sequence: Synthetic polypeptide
QVQLVQSGSELKKPGASVKVSCKASGYAFSSSWMNWVRQAPGQGLEWIGRIYPGDGDTKYNGKFKGRAVLSADKSVSTAYLQISSLKAEDTAVYYCARRGTGGWYFDVWGQGTTVTVSS

SEQ ID NO: 3148 - protein, 119 aa, Artificial Sequence
  Description of Artificial Sequence: Synthetic polypeptide
QVQLVQSGPEVKKPGTSVKVSCKASGYAFSSSWMNWVRQARGQRLEWIGRIYPGDGDTKYNGKFKGRATLTADKSTSTAYMELSSLRSEDTAVYYCARRGTGGWYFDVWGQGTTVTVSS

SEQ ID NO: 3149 - protein, 119 aa, Artificial Sequence
  Description of Artificial Sequence: Synthetic polypeptide
EVQLVQSGAEVKKPGESLKISCKASGYAFSSSWMNWVRQMPGKGLEWIGRIYPGDGDTKYNGKFKGQATLSADKSISTAYLQWSSLKASDTAMYYCARRGTGGWYFDVWGQGTTVTVSS

SEQ ID NO: 3150 - protein, 119 aa, Artificial Sequence
  Description of Artificial Sequence: Synthetic polypeptide
QVQLVQSGSELKKPGASVKVSCKASGYAFSSSWMNWVRQAPGQGLEWIGRIYPGDGDTKYNGKFKGRAVLSADKSVSMAYLQISSLKAEDTAVYYCARRGTGGWYFDVWGQGTTVTVSS

SEQ ID NO: 3151 - protein, 119 aa, Artificial Sequence
  Description of Artificial Sequence: Synthetic polypeptide
QVQLVQSGHEVKQPGASVKVSCKASGYAFSSSWMNWVPQAPGQGLEWIGRIYPGDGDTKYNGKFKGRAVLSADKSASTAYLQISSLKAEDMAMYYCARRGTGGWYFDVWGQGTTVTVSS

SEQ ID NO: 3152 - protein, 119 aa, Artificial Sequence
  Description of Artificial Sequence: Synthetic polypeptide
EVQLVQSGAEVKKPGESLKISCKASGYAFSSSWMNWVRQMPGKGLEWIGRIYPGDGDTKYNGKFKGQATLSADKPISTAYLQWSSLKASDTAMYYCARRGTGGWYFDVWGQGTTVTVSS

SEQ ID NO: 3153 - protein, 119 aa, Artificial Sequence
  Description of Artificial Sequence: Synthetic polypeptide
EVQLVQSGAEVKKPGESLRISCKASGYAFSSSWMNWVRQMPGKGLEWIGRIYPGDGDTKYNGKFKGQATLSADKSISTAYLQWSSLKASDTAMYYCARRGTGGWYFDVWGQGTTVTVSS

SEQ ID NO: 3154 - protein, 119 aa, Artificial Sequence
  Description of Artificial Sequence: Synthetic polypeptide
EVQLVQSGAEVKKPGESLRISCKASGYAFSSSWMNWVRQMPGKGLEWIGRIYPGDGDTKYNGKFKGHATLSADKSISTAYLQWSSLKASDTAMYYCARRGTGGWYFDVWGQGTTVTVSS

SEQ ID NO: 3155 - protein, 119 aa, Artificial Sequence
  Description of Artificial Sequence: Synthetic polypeptide
QVQLVQSGAEVKKTGSSVKVSCKASGYAFSSSWMNWVRQAPRQALEWIGRIYPGDGDTKYNGKFKGRATLTADKSMSTAYMELSSLRSEDTAMYYCARRGTGGWYFDVWGQGTTVTVSS

SEQ ID NO: 3156 - protein, 119 aa, Artificial Sequence
  Description of Artificial Sequence: Synthetic polypeptide
EVQLVESGGGLVQPGRSLRLSCTASGYAFSSSWMNWVRQAPGKGLEWIGRIYPGDGDTKYNGKFKGRATLSADKSKSIAYLQMNSLKTEDTAVYYCARRGTGGWYFDVWGQGTTVTVSS

SEQ ID NO: 3157 - protein, 119 aa, Artificial Sequence
  Description of Artificial Sequence: Synthetic polypeptide
EVQLVESGGGLVQPGPSLRLSCTASGYAFSSSWMNWVRQAPGKGLEWIGRIYPGDGDTKYNGKFKGRATLSADKSKSIAYLQMNSLKTEDTAVYYCARRGTGGWYFDVWGQGTTVTVSS

SEQ ID NO: 3158 - protein, 119 aa, Artificial Sequence
  Description of Artificial Sequence: Synthetic polypeptide
QVQLQESGPGLVKPSQTLSLTCTASGYAFSSSWMNWVRQPPGKGLEWIGRIYPGDGDTKYNGKFKGRATLSADKSKSQASLKLSSVTAADTAVYYCARRGTGGWYFDVWGQGTTVTVSS

SEQ ID NO: 3159 - protein, 119 aa, Artificial Sequence
  Description of Artificial Sequence: Synthetic polypeptide
QVQLQESGPGLVKPSGTLSLTCAASGYAFSSSWMNWVRQPPGKGLEWIGRIYPGDGDTKYNGKFKGRATLSADKSKSQASLKLSSVTAADTAVYYCARRGTGGWYFDVWGQGTTVTVSS

SEQ ID NO: 3160 - protein, 119 aa, Artificial Sequence
  Description of Artificial Sequence: Synthetic polypeptide
EVQLVESGGGLVKPGRSLRLSCTASGYAFSSSWMNWVRQAPGKGLEWIGRIYPGDGDTKYNGKFKGRATLSADKSKSIAYLQMNSLKTEDTAVYYCARRGTGGWYFDVWGQGTTVTVSS

SEQ ID NO: 3161 - protein, 119 aa, Artificial Sequence
  Description of Artificial Sequence: Synthetic polypeptide
EVQLVESGGGLVQPGGSLKLSCAASGYAFSSSWMNWVRQASGKGLEWIGRIYPGDGDTKYNGKFKGRATLSADKSKSTAYLQMNSLKTEDTAVYYCARRGTGGWYFDVWGQGTTVTVSS

SEQ ID NO: 3162 - protein, 119 aa, Artificial Sequence
  Description of Artificial Sequence: Synthetic polypeptide
QVQLQESGPGLVKPSQTLSLTCAASGYAFSSSWMNWVRQPPGKGLEWIGRIYPGDGDTKYNGKFKGRATLSADKSKSQASLKLSSVTAADTAVYYCARRGTGGWYFDVWGQGTTVTVSS

SEQ ID NO: 3163 - protein, 119 aa, Artificial Sequence
  Description of Artificial Sequence: Synthetic polypeptide
EVQLVESGGGLVKPGGSLRLSCAASGYAFSSSWMNWVRQAPGKGLEWIGRIYPGDGDTKYNGKFKGRATLSADKSKSTAYLQMNSLKTEDTAVYYCARRGTGGWYFDVWGQGTTVTVSS

SEQ ID NO: 3164 - protein, 119 aa, Artificial Sequence
  Description of Artificial Sequence: Synthetic polypeptide
EVQLVESGGALVKPGGSLRLSCAASGYAFSSSWMNWVRQAPGKGLEWIGRIYPGDGDTKYNGKFKGRATLSADKSKSTAYLQMNSLKTEDTAVYYCARRGTGGWYFDVWGQGTTVTVSS

SEQ ID NO: 3165 - protein, 119 aa, Artificial Sequence
  Description of Artificial Sequence: Synthetic polypeptide
QVQLQESGPGLVKPSQTLSLTCAAYGYAFSSSWMNWVRQPPGKGLEWIGRIYPGDGDTKYNGKFKGRATLSADKSKSQASLKLSSVTAADTAVYYCARRGTGGWYFDVWGQGTTVTVSS

SEQ ID NO: 3166 - protein, 119 aa, Artificial Sequence
  Description of Artificial Sequence: Synthetic polypeptide
QVQLQESGSGLVKPSQTLSLTCAASGYAFSSSWMNWVRQPPGKGLEWIGRIYPGDGDTKYNGKFKGRATLSADKSKSQASLKLSSVTAADTAVYYCARRGTGGWYFDVWGQGTTVTVSS

SEQ ID NO: 3167 - protein, 119 aa, Artificial Sequence
  Description of Artificial Sequence: Synthetic polypeptide
EVQLVESGGGLVQPGGSLRLSCAASGYAFSSSWMNWVRQAPGKGLEWIGRIYPGDGDTKYNGKFKGRATLSADKSKSSAYLQMNSLKTEDTAVYYCARRGTGGWYFDVWGQGTTVTVSS

SEQ ID NO: 3168 - protein, 119 aa, Artificial Sequence
  Description of Artificial Sequence: Synthetic polypeptide
QVQLQESGPGLVKPSDTLSLTCTASGYAFSSSWMNWVRQPPGKGLEWIGRIYPGDGDTKYNGKFKGRATLSADKSKSQASLKLSSVTAADTAVYYCARRGTGGWYFDVWGQGTTVTVSS

SEQ ID NO: 3169 - protein, 119 aa, Artificial Sequence
  Description of Artificial Sequence: Synthetic polypeptide
QVQLQESGPGLVKPSQTLSLTCTASGYAFSSSWMNWVRQHPGKGLEWIGRIYPGDGDTKYNGKFKGRATLSADKSKSQASLKLSSVTAADTAVYYCARRGTGGWYFDVWGQGTTVTVSS

SEQ ID NO: 3170 - protein, 119 aa, Artificial Sequence
  Description of Artificial Sequence: Synthetic polypeptide
QVQLQESGPGLVKPSQTLSLTCTASGYAFSSSWMNWVRQHPGKGLEWIGRIYPGDGDTKYNGKFKGLATLSADKSKSQASLKLSSVTAADTAVYYCARRGTGGWYFDVWGQGTTVTVSS

SEQ ID NO: 3171 - protein, 119 aa, Artificial Sequence
  Description of Artificial Sequence: Synthetic polypeptide
QVQLVESGGGVVQPGRSLRLSCAASGYAFSSSWMNWVRQAPGKGLEWIGRIYPGDGDTKYNGKFKGRATLSADKSKSTAYLQMSSLRAEDTAVYYCARRGTGGWYFDVWGQGTTVTVSS

SEQ ID NO: 3172 - protein, 119 aa, Artificial Sequence
  Description of Artificial Sequence: Synthetic polypeptide
QVQLVESGGGLVKPGGSLRLSCAASGYAFSSSWMNWVRQAPGKGLEWIGRIYPGDGDTKYNGKFKGRATLSADKAKSSAYLQMNSLRAEDTAVYYCARRGTGGWYFDVWGQGTTVTVSS

SEQ ID NO: 3173 - protein, 119 aa, Artificial Sequence
  Description of Artificial Sequence: Synthetic polypeptide
QVQLVESGGGLVQPGGSLRLSCSASGYAFSSSWMNWVRQAPGKGLEWIGRIYPGDGDTKYNGKFKGRATLSADKSKSTAYLQMNSLRAEDTAVYYCARRGTGGWYFDVWGQGTTVTVSS

SEQ ID NO: 3174 - protein, 119 aa, Artificial Sequence
  Description of Artificial Sequence: Synthetic polypeptide
QVQLLESGGGLVKPGGSLRLSCAASGYAFSSSWMNWVRQAPGKGLEWIGRIYPGDGDTKYNGKFKGRATLSADKAKSSAYLQMNSLRAEDTAVYYCARRGTGGWYFDVWGQGTTVTVSS

SEQ ID NO: 3175 - protein, 119 aa, Artificial Sequence
  Description of Artificial Sequence: Synthetic polypeptide
EVQLVESGGGLVQPGGSLRLSCSASGYAFSSSWMNWVRQAPGKGLEWIGRIYPGDGDTKYNGKFKGRATLSADKSKSTAYLQMSSLRAEDTAVYYCARRGTGGWYFDVWGQGTTVTVSS

SEQ ID NO: 3176 - protein, 119 aa, Artificial Sequence
  Description of Artificial Sequence: Synthetic polypeptide
QVQLQESGPGLVKPSDTLSLTCAASGYAFSSSWMNWVRQPPGKGLEWIGRIYPGDGDTKYNGKFKGRATLSADKSKSQASLKLSSVTAVDTAVYYCARRGTGGWYFDVWGQGTTVTVSS

SEQ ID NO: 3177 - protein, 119 aa, Artificial Sequence
  Description of Artificial Sequence: Synthetic polypeptide
QVQLQESGPGLVKPSQTLSLTCAASGYAFSSSWMNWVRQPPGKGLEWIGRIYPGDGDTKYNGKFKGRATLSADKSKSQASLKLSSVTAVDTAVYYCARRGTGGWYFDVWGQGTTVTVSS

SEQ ID NO: 3178 - protein, 119 aa, Artificial Sequence
  Description of Artificial Sequence: Synthetic polypeptide
EVQLVESGGGLVQPGGSLRLSCSASGYAFSSSWMNWVRQAPGKGLEWIGRIYPGDGDTKYNGKFKGRATLSADKSKSTAYVQMSSLRAEDTAVYYCARRGTGGWYFDVWGQGTTVTVSS

SEQ ID NO: 3179 - protein, 119 aa, Artificial Sequence
  Description of Artificial Sequence: Synthetic polypeptide
QVQLVDSGGGVVQPGRSLRLSCAASGYAFSSSWMNWVRQAPGKGLEWIGRIYPGDGDTKYNGKFKGRATLSADKSKSTAYLQMNSLRAEDTAVYYCARRGTGGWYFDVWGQGTTVTVSS

SEQ ID NO: 3180 - protein, 119 aa, Artificial Sequence
  Description of Artificial Sequence: Synthetic polypeptide
QVQLVESGGGVVQPGRSLRLSCAASGYAFSSSWMNWVRQAPGKGLEWIGRIYPGDGDTKYNGKFKGRATLSADKSKSTAYLQMNSLRAEGTAVYYCARRGTGGWYFDVWGQGTTVTVSS

SEQ ID NO: 3181 - protein, 119 aa, Artificial Sequence
  Description of Artificial Sequence: Synthetic polypeptide
QVQLVESGGGVVQPGRSLRLSCAASGYAFSSSWMNWVRQAPGKGLEWIGRIYPGDGDTKYNGKFKGRATLSADKSKSTAYLQMNSLRAEDTAVYYCARRGTGGWYFDVWGQGTTVTVSS

SEQ ID NO: 3182 - protein, 119 aa, Artificial Sequence
  Description of Artificial Sequence: Synthetic polypeptide
EVQLVESGGGLVQPGGSLRLSCAASGYAFSSSWMNWVRQAPGKGLEWIGRIYPGDGDTKYNGKFKGRATLSADKSKSTAYLQMNSLRAEDTAVYYCARRGTGGWYFDVWGQGTTVTVSS

SEQ ID NO: 3183 - protein, 117 aa, Artificial Sequence
  Description of Artificial Sequence: Synthetic polypeptide
EVQLVESGGDLVKPGGSLKLSCAVSGFTFRSYGMSWVRQTPDKRLEWVALISSGGSYTYYTDSVKGRFTISRDNAKNTLYLQMSSLKSEDTAIYYCSRHGGNFFDYWGQGTTLTVSS

SEQ ID NO: 3184 - protein, 107 aa, Artificial Sequence
  Description of Artificial Sequence: Synthetic polypeptide
QIVLTQSPSIMSASPGEKVTMTCSVSSSVSYMHWYQQKSGTSPKRWIYDTSKLASGVPARFSGSGSGTSYSLTISSMEAEDAATYYCQQWSSNPQYTFGGGTKLEIK

SEQ ID NO: 3185 - protein, 107 aa, Artificial Sequence
  Description of Artificial Sequence: Synthetic polypeptide
DIVLTQSPAFLSVTPGEKVTITCSVSSSVSYMHWYQQKPDQAPKLLIYDTSKLASGVPSRFSGSGSGTDYTFTISSLEAEDAATYYCQQWSSNPQYTFGQGTKLEIK

SEQ ID NO: 3186 - protein, 107 aa, Artificial Sequence
  Description of Artificial Sequence: Synthetic polypeptide
AIQLTQSPSSLSASVGDRVTITCSVSSSVSYMHWYQQKPGKAPKLLIYDTSKLASGVPSRFSGSGSGTDYTLTISSLQPEDFATYYCQQWSSNPQYTFGQGTKLEIK

SEQ ID NO: 3187 - protein, 107 aa, Artificial Sequence
  Description of Artificial Sequence: Synthetic polypeptide
DIQLTQSPSFLSASVGDRVTITCSVSSSVSYMHWYQQKPGKAPKLLIYDTSKLASGVPSRFSGSGSGTEYTLTISSLQPEDFATYYCQQWSSNPQYTFGQGTKLEIK

SEQ ID NO: 3188 - protein, 107 aa, Artificial Sequence
  Description of Artificial Sequence: Synthetic polypeptide
DIQLTQSPSSLSASVGDRVTITCSVSSSVSYMHWYQQKPGKAPKLLIYDTSKLASGVPSRFSGSGSGTDYTLTISSLQPEDFATYYCQQWSSNPQYTFGQGTKLEIK

SEQ ID NO: 3189 - protein, 107 aa, Artificial Sequence
  Description of Artificial Sequence: Synthetic polypeptide
DIQLTQSPSSVSASVGDRVTITCSVSSSVSYMHWYQQKPGKAPKLLIYDTSKLASGVPSRFSGSGSGTDYTLTISSLQPEDFATYYCQQWSSNPQYTFGQGTKLEIK

SEQ ID NO: 3190 - protein, 107 aa, Artificial Sequence
  Description of Artificial Sequence: Synthetic polypeptide
DIQLTQSPSSLSASVGDRVTITCSVSSSVSYMHWYQQKPGKVPKLLIYDTSKLASGVPSRFSGSGSGTDYTLTISSLQPEDVATYYCQQWSSNPQYTFGQGTKLEIK

SEQ ID NO: 3191 - protein, 107 aa, Artificial Sequence
  Description of Artificial Sequence: Synthetic polypeptide
DIQLTQSPSSLSASVGDRVTITCSVSSSVSYMHWYQQKPGQAPKLLIYDTSKLASGVPSRFSGSGSGTDYTLTISSLQPEDVATYYCQQWSSNPQYTFGQGTKLEIK

SEQ ID NO: 3192 - protein, 481 aa, Artificial Sequence
  Description of Artificial Sequence: Synthetic polypeptide
  MOD_RES (330)..(330): K or absent
ASTKGPSVFPLAPSSKSTSGGTAALGCLVKDYFPEPVTVSWNSGALTSGVHTFPAVLQSSGLYSLSSVVTVPSSSLGTQTYICNVNHKPSNTKVDKRVEPKSCDKTHTCPPCPAPELLGGPSVFLFPPKPKDTLMISRTPEVTCVVVDVSHEDPEVKFNWYVDGVEVHNAKTKPREEQYNSTYRVVSVLTVLHQDWLNGKEYKCKVSNKALPAPIEKTISKAKGQPREPQVCTLPPSREEMTKNQVSLSCAVKGFYPSDIAVEWESNGQPENNYKTTPPVLDSDGSFFLVSKLTVDKSRWQQGNVFSCSVMHEALHNHYTQKSLSLSPGXGGGGSGGGGSGGGGSIPPHVQKSVNNDMIVTDNNGAVKFPQLCKFCDVRFSTCDNQKSCMSNCSITSICEKPQEVCVAVWRKNDENITLETVCHDPKLPYHDFILEDAASPKCIMKEKKKPGETFFMCSCSSDECNDNIIFSEEYNTSNPD

SEQ ID NO: 3193 - protein, 481 aa, Artificial Sequence
  Description of Artificial Sequence: Synthetic polypeptide
  MOD_RES (330)..(330): K or absent
ASTKGPSVFPLAPSSKSTSGGTAALGCLVKDYFPEPVTVSWNSGALTSGVHTFPAVLQSSGLYSLSSVVTVPSSSLGTQTYICNVNHKPSNTKVDKRVEPKSCDKTHTCPPCPAPELLGGPSVFLFPPKPKDTLMISRTPEVTCVVVDVSHEDPEVKFNWYVDGVEVHNAKTKPREEQYNSTYRVVSVLTVLHQDWLNGKEYKCKVSNKALPAPIEKTISKAKGQPREPQVYTLPPCREEMTKNQVSLWCLVKGFYPSDIAVEWESNGQPENNYKTTPPVLDSDGSFFLYSKLTVDKSRWQQGNVFSCSVMHEALHNHYTQKSLSLSPGXGGGGSGGGGSGGGGSIPPHVQKSVNNDMIVTDNNGAVKFPQLCKFCDVRFSTCDNQKSCMSNCSITSICEKPQEVCVAVWRKNDENITLETVCHDPKLPYHDFILEDAASPKCIMKEKKKPGETFFMCSCSSDECNDNIIFSEEYNTSNPD

SEQ ID NO: 3194 - protein, 378 aa, Artificial Sequence
  Description of Artificial Sequence: Synthetic polypeptide
  MOD_RES (227)..(227): K or absent
DKTHTCPPCPAPELLGGPSVFLFPPKPKDTLMISRTPEVTCVVVDVSHEDPEVKFNWYVDGVEVHNAKTKPREEQYNSTYRVVSVLTVLHQDWLNGKEYKCKVSNKALPAPIEKTISKAKGQPREPQVCTLPPSREEMTKNQVSLSCAVKGFYPSDIAVEWESNGQPENNYKTTPPVLDSDGSFFLVSKLTVDKSRWQQGNVFSCSVMHEALHNHYTQKSLSLSPGXGGGGSGGGGSGGGGSIPPHVQKSVNNDMIVTDNNGAVKFPQLCKFCDVRFSTCDNQKSCMSNCSITSICEKPQEVCVAVWRKNDENITLETVCHDPKLPYHDFILEDAASPKCIMKEKKKPGETFFMCSCSSDECNDNIIFSEEYNTSNPD

SEQ ID NO: 3195 - protein, 378 aa, Artificial Sequence
  Description of Artificial Sequence: Synthetic polypeptide
  MOD_RES (227)..(227): K or absent
DKTHTCPPCPAPELLGGPSVFLFPPKPKDTLMISRTPEVTCVVVDVSHEDPEVKFNWYVDGVEVHNAKTKPREEQYNSTYRVVSVLTVLHQDWLNGKEYKCKVSNKALPAPIEKTISKAKGQPREPQVYTLPPCREEMTKNQVSLWCLVKGFYPSDIAVEWESNGQPENNYKTTPPVLDSDGSFFLYSKLTVDKSRWQQGNVFSCSVMHEALHNHYTQKSLSLSPGXGGGGSGGGGSGGGGSIPPHVQKSVNNDMIVTDNNGAVKFPQLCKFCDVRFSTCDNQKSCMSNCSITSICEKPQEVCVAVWRKNDENITLETVCHDPKLPYHDFILEDAASPKCIMKEKKKPGETFFMCSCSSDECNDNIIFSEEYNTSNPD

SEQ ID NO: 3196 - protein, 481 aa, Artificial Sequence
  Description of Artificial Sequence: Synthetic polypeptide
  MOD_RES (481)..(481): K or absent
IPPHVQKSVNNDMIVTDNNGAVKFPQLCKFCDVRFSTCDNQKSCMSNCSITSICEKPQEVCVAVWRKNDENITLETVCHDPKLPYHDFILEDAASPKCIMKEKKKPGETFFMCSCSSDECNDNIIFSEEYNTSNPDGGGGSGGGGSGGGGSASTKGPSVFPLAPSSKSTSGGTAALGCLVKDYFPEPVTVSWNSGALTSGVHTFPAVLQSSGLYSLSSVVTVPSSSLGTQTYICNVNHKPSNTKVDKRVEPKSCDKTHTCPPCPAPELLGGPSVFLFPPKPKDTLMISRTPEVTCVVVDVSHEDPEVKFNWYVDGVEVHNAKTKPREEQYNSTYRVVSVLTVLHQDWLNGKEYKCKVSNKALPAPIEKTISKAKGQPREPQVCTLPPSREEMTKNQVSLSCAVKGFYPSDIAVEWESNGQPENNYKTTPPVLDSDGSFFLVSKLTVDKSRWQQGNVFSCSVMHEALHNHYTQKSLSLSPGX

SEQ ID NO: 3197 - protein, 481 aa, Artificial Sequence
  Description of Artificial Sequence: Synthetic polypeptide
  MOD_RES (481)..(481): K or absent
IPPHVQKSVNNDMIVTDNNGAVKFPQLCKFCDVRFSTCDNQKSCMSNCSITSICEKPQEVCVAVWRKNDENITLETVCHDPKLPYHDFILEDAASPKCIMKEKKKPGETFFMCSCSSDECNDNIIFSEEYNTSNPDGGGGSGGGGSGGGGSASTKGPSVFPLAPSSKSTSGGTAALGCLVKDYFPEPVTVSWNSGALTSGVHTFPAVLQSSGLYSLSSVVTVPSSSLGTQTYICNVNHKPSNTKVDKRVEPKSCDKTHTCPPCPAPELLGGPSVFLFPPKPKDTLMISRTPEVTCVVVDVSHEDPEVKFNWYVDGVEVHNAKTKPREEQYNSTYRVVSVLTVLHQDWLNGKEYKCKVSNKALPAPIEKTISKAKGQPREPQVYTLPPCREEMTKNQVSLWCLVKGFYPSDIAVEWESNGQPENNYKTTPPVLDSDGSFFLYSKLTVDKSRWQQGNVFSCSVMHEALHNHYTQKSLSLSPGX

SEQ ID NO: 3198 - protein, 257 aa, Artificial Sequence
  Description of Artificial Sequence: Synthetic polypeptide
IPPHVQKSVNNDMIVTDNNGAVKFPQLCKFCDVRFSTCDNQKSCMSNCSITSICEKPQEVCVAVWRKNDENITLETVCHDPKLPYHDFILEDAASPKCIMKEKKKPGETFFMCSCSSDECNDNIIFSEEYNTSNPDGGGGSGGGGSGGGGSGQPKANPTVTLFPPSSEELQANKATLVCLISDFYPGAVTVAWKADGSPVKAGVETTKPSKQSNNKYAASSYLSLTPEQWKSHRSYSCQVTHEGSTVEKTVAPTECS

SEQ ID NO: 3199 - protein, 258 aa, Artificial Sequence
  Description of Artificial Sequence: Synthetic polypeptide
IPPHVQKSVNNDMIVTDNNGAVKFPQLCKFCDVRFSTCDNQKSCMSNCSITSICEKPQEVCVAVWRKNDENITLETVCHDPKLPYHDFILEDAASPKCIMKEKKKPGETFFMCSCSSDECNDNIIFSEEYNTSNPDGGGGSGGGGSGGGGSRTVAAPSVFIFPPSDEQLKSGTASVVCLLNNFYPREAKVQWKVDNALQSGNSQESVTEQDSKDSTYSLSSTLTLSKADYEKHKVYACEVTHQGLSSPVTKSFNRGEC

SEQ ID NO: 3200 - protein, 107 aa, Artificial Sequence
  Description of Artificial Sequence: Synthetic polypeptide
EIVLTQSPATLSLSPGERATLSCSVSSSVSYMHWYQQKPGQAPKLLIYDTSKLASGIPARFSGSGPGTDYTLTISSLEPEDFAVYYCQQWSSNPQYTFGQGTKLEIK

SEQ ID NO: 3201 - protein, 107 aa, Artificial Sequence
  Description of Artificial Sequence: Synthetic polypeptide
EIVLTQSPATLSLSPGERATLSCSVSSSVSYMHWYQQKPGQAPKLLIYDTSKLASGIPARFSGSGSGTDYTLTISRLEPEDFAVYYCQQWSSNPQYTFGQGTKLEIK

SEQ ID NO: 3202 - protein, 107 aa, Artificial Sequence
  Description of Artificial Sequence: Synthetic polypeptide
EIVLTQSPATLSLSPGERATLSCSVSSSVSYMHWYQQKPGQAPKLLIYDTSKLASGIPARFSGSGSGTDYTLTISSLQPEDFAVYYCQQWSSNPQYTFGQGTKLEIK

SEQ ID NO: 3203 - protein, 107 aa, Artificial Sequence
  Description of Artificial Sequence: Synthetic polypeptide
EIVLTQSPATLSVSPGERATLSCSVSSSVSYMHWYQQKPGQAPKLLIYDTSKLASGIPARFSGSGSGTEYTLTISSLQSEDFAVYYCQQWSSNPQYTFGQGTKLEIK

SEQ ID NO: 3204 - protein, 107 aa, Artificial Sequence
  Description of Artificial Sequence: Synthetic polypeptide
EIVLTQSPATLSVSPGERATLSCSVSSSVSYMHWYQQKPGQAPKLLIYDTSKLASGIPARFSGSGSGTEYTLTISILQSEDFAVYYCQQWSSNPQYTFGQGTKLEIK

SEQ ID NO: 3205 - protein, 107 aa, Artificial Sequence
  Description of Artificial Sequence: Synthetic polypeptide
EIVLTQSPPTLSLSPGERVTLSCSVSSSVSYMHWYQQKPGQAPKLLIYDTSKLASSIPARFSGSGSGTDYTLTISSLQPEDFAVYYCQQWSSNPQYTFGQGTKLEIK

SEQ ID NO: 3206 - protein, 107 aa, Artificial Sequence
  Description of Artificial Sequence: Synthetic polypeptide
DIQLTQSPSSLSASVGDRVTITCSVSSSVSYMHWYQQKPGKAPKSLIYDTSKLASGVPSRFSGSGSGTDYTLTISSLQPEDFATYYCQQWSSNPQYTFGQGTKLEIK

SEQ ID NO: 3207 - protein, 107 aa, Artificial Sequence
  Description of Artificial Sequence: Synthetic polypeptide
DIQLTQSPSSLSASVGDRVTITCSVSSSVSYMHWYQQKPGKAPKRLIYDTSKLASGVPSRFSGSGSGTEYTLTISNLQPEDFATYYCQQWSSNPQYTFGQGTKLEIK

SEQ ID NO: 3208 - protein, 107 aa, Artificial Sequence
  Description of Artificial Sequence: Synthetic polypeptide
DIQLTQSPSAMSASVGDRVTITCSVSSSVSYMHWYQQKPGKVPKRLIYDTSKLASGVPSRFSGSGSGTEYTLTISSLQPEDFATYYCQQWSSNPQYTFGQGTKLEIK

SEQ ID NO: 3209 - protein, 107 aa, Artificial Sequence
  Description of Artificial Sequence: Synthetic polypeptide
EIVLTQSPATLSLSPGERATLSCSVSSSVSYMHWYQQKPGQAPKLLIYDTSKLASGIPDRFSGSGSGTDYTLTISRLEPEDFAVYYCQQWSSNPQYTFGQGTKLEIK

SEQ ID NO: 3210 - protein, 107 aa, Artificial Sequence
  Description of Artificial Sequence: Synthetic polypeptide
EIVLTQSPATLSLSPGERATLSCSVSSSVSYMHWYQQKPGLAPKLLIYDTSKLASGIPDRFSGSGSGTDYTLTISRLEPEDFAVYYCQQWSSNPQYTFGQGTKLEIK

SEQ ID NO: 3211 - protein, 107 aa, Artificial Sequence
  Description of Artificial Sequence: Synthetic polypeptide
EIVLTQSPGTLSLSPGERATLSCSVSSSVSYMHWYQQKPGQAPKLLIYDTSKLASGIPDRFSGSGSGTDYTLTISRLEPEDFAVYYCQQWSSNPQYTFGQGTKLEIK

SEQ ID NO: 3212 - protein, 107 aa, Artificial Sequence
  Description of Artificial Sequence: Synthetic polypeptide
DIQLTQSPSSLSASVGDRVTITCSVSSSVSYMHWYQQKPGKAPKSLIYDTSKLASGVPSKFSGSGSGTDYTLTISSLQPEDFATYYCQQWSSNPQYTFGQGTKLEIK

SEQ ID NO: 3213 - protein, 107 aa, Artificial Sequence
  Description of Artificial Sequence: Synthetic polypeptide
DIQLTQSPSSLSASVGDRVTITCSVSSSVSYMHWYQQKPEKAPKSLIYDTSKLASGVPSRFSGSGSGTDYTLTISSLQPEDFATYYCQQWSSNPQYTFGQGTKLEIK

SEQ ID NO: 3214 - protein, 107 aa, Artificial Sequence
  Description of Artificial Sequence: Synthetic polypeptide
DIVLTQSPDSLAVSLGERATINCSVSSSVSYMHWYQQKPGQPPKLLIYDTSKLASGVPDRFSGSGSGTDYTLTISSLQAEDVAVYYCQQWSSNPQYTFGQGTKLEIK

SEQ ID NO: 3215 - protein, 107 aa, Artificial Sequence
  Description of Artificial Sequence: Synthetic polypeptide
EIVLTQTPLSLSITPGEQASMSCSVSSSVSYMHWYLQKARPVPKLLIYDTSKLASGVPDRFSGSGSGTDYTLKISRVEAEDFGVYYCQQWSSNPQYTFGQGTKLEIK

SEQ ID NO: 3216 - protein, 107 aa, Artificial Sequence
  Description of Artificial Sequence: Synthetic polypeptide
EIVLTQTPLSLSITPGEQASISCSVSSSVSYMHWYLQKARPVPKLLIYDTSKLASGVPDRFSGSGSGTDYTLKISRVEAEDFGVYYCQQWSSNPQYTFGQGTKLEIK

SEQ ID NO: 3217 - protein, 107 aa, Artificial Sequence
  Description of Artificial Sequence: Synthetic polypeptide
DIVLTQSPLSLPVTPGEPASISCSVSSSVSYMHWYLQKPGQSPKLLIYDTSKLASGVPDRFSGSGSGTDYTLKISRVEAEDVGVYYCQQWSSNPQYTFGQGTKLEIK

SEQ ID NO: 3218 - protein, 107 aa, Artificial Sequence
  Description of Artificial Sequence: Synthetic polypeptide
DIVLTQSPLSLPVTLGQPASISCSVSSSVSYMHWYQQRPGQSPKRLIYDTSKLASGVPDRFSGSGSGTDYTLKISRVEAEDVGVYYCQQWSSNPQYTFGQGTKLEIK

SEQ ID NO: 3219 - protein, 107 aa, Artificial Sequence
  Description of Artificial Sequence: Synthetic polypeptide
DIVLTQTPLSLPVTPGEPASISCSVSSSVSYMHWYLQKPGQSPKLLIYDTSKLASGVPDRFSGSGSGTDYTLKISRVEAEDVGVYYCQQWSSNPQYTFGQGTKLEIK

SEQ ID NO: 3220 - protein, 107 aa, Artificial Sequence
  Description of Artificial Sequence: Synthetic polypeptide
DIVLTQTPLSLSVTPGQPASISCSVSSSVSYMHWYLQKPGQSPKLLIYDTSKLASGVPDRFSGSGSGTDYTLKISRVEAEDVGVYYCQQWSSNPQYTFGQGTKLEIK

SEQ ID NO: 3221 - protein, 107 aa, Artificial Sequence
  Description of Artificial Sequence: Synthetic polypeptide
DIVLTQTPLSLSVTPGQPASISCSVSSSVSYMHWYLQKPGQPPKLLIYDTSKLASGVPDRFSGSGSGTDYTLKISRVEAEDVGVYYCQQWSSNPQYTFGQGTKLEIK

SEQ ID NO: 3222 - protein, 107 aa, Artificial Sequence
  Description of Artificial Sequence: Synthetic polypeptide
DIQLIQSPSFLSASVGDRVSIICSVSSSVSYMHWYLQKPGKSPKLFIYDTSKLASGVSSRFSGRGSGTDYTLTIISLKPEDFAAYYCQQWSSNPQYTFGQGTKLEIK

SEQ ID NO: 3223 - protein, 107 aa, Artificial Sequence
  Description of Artificial Sequence: Synthetic polypeptide
DIVLTQTPLSSPVTLGQPASISCSVSSSVSYMHWYQQRPGQPPKLLIYDTSKLASGVPDRFSGSGAGTDYTLKISRVEAEDVGVYYCQQWSSNPQYTFGQGTKLEIK

SEQ ID NO: 3224 - protein, 107 aa, Artificial Sequence
  Description of Artificial Sequence: Synthetic polypeptide
EITLTQSPAFMSATPGDKVNISCSVSSSVSYMHWYQQKPGEAPKFIIYDTSKLASGIPPRFSGSGYGTDYTLTINNIESEDAAYYYCQQWSSNPQYTFGQGTKLEIK

SEQ ID NO: 3225 - protein, 117 aa, Artificial Sequence
  Description of Artificial Sequence: Synthetic polypeptide
EVQLVESGGGLVKPGGSLRLSCAVSGFTFRSYGMSWVRQAPGKGLEWVALISSGGSYTYYTDSVKGRFTISRDNSKNTLYLQMNSLKTEDTAVYYCSRHGGNFFDYWGQGTTVTVSS

SEQ ID NO: 3226 - protein, 117 aa, Artificial Sequence
  Description of Artificial Sequence: Synthetic polypeptide
EVQLVESGGALVKPGGSLRLSCAVSGFTFRSYGMSWVRQAPGKGLEWVALISSGGSYTYYTDSVKGRFTISRDNSKNTLYLQMNSLKTEDTAVYYCSRHGGNFFDYWGQGTTVTVSS

SEQ ID NO: 3227 - protein, 117 aa, Artificial Sequence
  Description of Artificial Sequence: Synthetic polypeptide
EVQLVESGGGLVQPGGSLRLSCAVSGFTFRSYGMSWVRQAPGKGLEWVALISSGGSYTYYTDSVKGRFTISRDNAKNTLYLQMNSLRAEDTAVYYCSRHGGNFFDYWGQGTTVTVSS

SEQ ID NO: 3228 - protein, 117 aa, Artificial Sequence
  Description of Artificial Sequence: Synthetic polypeptide
EVQLVESGGGLVQPGGSLRLSCAVSGFTFRSYGMSWVRQAPGKGLEWVALISSGGSYTYYTDSVKGRFTISRDNAKNSLYLQMNSLRAEDTAVYYCSRHGGNFFDYWGQGTTVTVSS

SEQ ID NO: 3229 - protein, 117 aa, Artificial Sequence
  Description of Artificial Sequence: Synthetic polypeptide
EVQLVESGGGLVQPGGSLRLSCAVSGFTFRSYGMSWVRQAPGKGLEWVALISSGGSYTYYTDSVKGRFTISRDNSKNSLYLQMNSLKTEDTAVYYCSRHGGNFFDYWGQGTTVTVSS

SEQ ID NO: 3230 - protein, 117 aa, Artificial Sequence
  Description of Artificial Sequence: Synthetic polypeptide
EVQLVESGGGLVQPGGSLRLSCAVSGFTFRSYGMSWVRQAPGKGLEWVALISSGGSYTYYTDSVKGRFTISRDNAKNSLYLQMNSLRAEDMAVYYCSRHGGNFFDYWGQGTTVTVSS

SEQ ID NO: 3231 - protein, 117 aa, Artificial Sequence
  Description of Artificial Sequence: Synthetic polypeptide
EVQLVESGGGLVQPGGSLRLSCAVSGFTFRSYGMSWVRQAPGKGLEWVALISSGGSYTYYTDSVKGQFTISRDNAKNTLYLQMNSLRAEDMAVYYCSRHGGNFFDYWGQGTTVTVSS

SEQ ID NO: 3232 - protein, 117 aa, Artificial Sequence
  Description of Artificial Sequence: Synthetic polypeptide
EVQLVESGGGLVKPGRSLRLSCTVSGFTFRSYGMSWVRQAPGKGLEWVALISSGGSYTYYTDSVKGRFTISRDNSKNILYLQMNSLKTEDTAVYYCSRHGGNFFDYWGQGTTVTVSS

SEQ ID NO: 3233 - protein, 117 aa, Artificial Sequence
  Description of Artificial Sequence: Synthetic polypeptide
EVQLVESGGGLVKPGGSLRLSCAVSGFTFRSYGMSWVRQAPGKGLEWVALISSGGSYTYYTDSVKGRFTISRDNAKNSLYLQMNSLRAEDTAVYYCSRHGGNFFDYWGQGTTVTVSS

SEQ ID NO: 3234 - protein, 117 aa, Artificial Sequence
  Description of Artificial Sequence: Synthetic polypeptide
EVQLVESGGGLVQPGGSLKLSCAVSGFTFRSYGMSWVRQASGKGLEWVALISSGGSYTYYTDSVKGRFTISRDNSKNTLYLQMNSLKTEDTAVYYCSRHGGNFFDYWGQGTTVTVSS

SEQ ID NO: 3235 - protein, 117 aa, Artificial Sequence
  Description of Artificial Sequence: Synthetic polypeptide
QVQLVESGGGVVQPGGSLRLSCAVSGFTFRSYGMSWVRQAPGKGLEWVALISSGGSYTYYTDSVKGRFTISRDNSKNTLYLQMNSLRAEDTAVYYCSRHGGNFFDYWGQGTTVTVSS

SEQ ID NO: 3236 - protein, 117 aa, Artificial Sequence
  Description of Artificial Sequence: Synthetic polypeptide
QVQLVESGGGVVQPGRSLRLSCAVSGFTFRSYGMSWVRQAPGKGLEWVALISSGGSYTYYTDSVKGRFTISRDNSKNTLYLQMSSLRAEDTAVYYCSRHGGNFFDYWGQGTTVTVSS

SEQ ID NO: 3237 - protein, 117 aa, Artificial Sequence
  Description of Artificial Sequence: Synthetic polypeptide
EVQLVESGGGLVQPGGSLRLSCPVSGFTFRSYGMSWVRQAPGKGLEWVALISSGGSYTYYTDSVKGRFTISRDNANNSLYLQMNSLRAEDTAVYYCSRHGGNFFDYWGQGTTVTVSS

SEQ ID NO: 3238 - protein, 117 aa, Artificial Sequence
  Description of Artificial Sequence: Synthetic polypeptide
EVQLVESGGGLVQPGRSLRLSCTVSGFTFRSYGMSWVRQAPGKGLEWVALISSGGSYTYYTDSVKGRFTISRDNSKNILYLQMNSLKTEDTAVYYCSRHGGNFFDYWGQGTTVTVSS

SEQ ID NO: 3239 - protein, 117 aa, Artificial Sequence
  Description of Artificial Sequence: Synthetic polypeptide
EVQLVESGGGLVQPGPSLRLSCTVSGFTFRSYGMSWVRQAPGKGLEWVALISSGGSYTYYTDSVKGRFTISRDNSKNILYLQMNSLKTEDTAVYYCSRHGGNFFDYWGQGTTVTVSS

SEQ ID NO: 3240 - protein, 117 aa, Artificial Sequence
  Description of Artificial Sequence: Synthetic polypeptide
EVQLVESGGGLVQPGGSLRLSCAVSGFTFRSYGMSWVRQAPGKGLEWVALISSGGSYTYYTDSVKGRFTISRDNSKNTLYLQMNSLRAEDTAVYYCSRHGGNFFDYWGQGTTVTVSS

SEQ ID NO: 3241 - protein, 117 aa, Artificial Sequence
  Description of Artificial Sequence: Synthetic polypeptide
EVQLVESGGGLVQPGGSLRLSCAVSGFTFRSYGMSWVRQAPGKGLEWVALISSGGSYTYYTDSVKGRFTISRDNAKNSLYLQMNSLRDEDTAVYYCSRHGGNFFDYWGQGTTVTVSS

SEQ ID NO: 3242 - protein, 117 aa, Artificial Sequence
  Description of Artificial Sequence: Synthetic polypeptide
QVQLVESGGGLVKPGGSLRLSCAVSGFTFRSYGMSWVRQAPGKGLEWVALISSGGSYTYYTDSVKGRFTISRDNAKNSLYLQMNSLRAEDTAVYYCSRHGGNFFDYWGQGTTVTVSS

SEQ ID NO: 3243 - protein, 117 aa, Artificial Sequence
  Description of Artificial Sequence: Synthetic polypeptide
QVQLVESGGGVVQPGRSLRLSCAVSGFTFRSYGMSWVRQAPGKGLEWVALISSGGSYTYYTDSVKGRFTISRDNSKNTLYLQMNSLRAEDTAVYYCSRHGGNFFDYWGQGTTVTVSS

SEQ ID NO: 3244 - protein, 117 aa, Artificial Sequence
  Description of Artificial Sequence: Synthetic polypeptide
EVQLLESGGGLVQPGGSLRLSCAVSGFTFRSYGMSWVRQAPGKGLEWVALISSGGSYTYYTDSVKGRFTISRDNSKNTLYLQMNSLRAEDTAVYYCSRHGGNFFDYWGQGTTVTVSS

SEQ ID NO: 3245 - protein, 117 aa, Artificial Sequence
  Description of Artificial Sequence: Synthetic polypeptide
EVQLVESGGGLVQPGGSLRLSCAVSGFTFRSYGMSWVRQAPGKGLEWVALISSGGSYTYYTDSVKGRFTISRHNSKNTLYLQMNSLRAEDTAVYYCSRHGGNFFDYWGQGTTVTVSS

SEQ ID NO: 3246 - protein, 117 aa, Artificial Sequence
  Description of Artificial Sequence: Synthetic polypeptide
EVQLVESGGGLIQPGGSLRLSCAVSGFTFRSYGMSWVRQPPGKGLEWVALISSGGSYTYYTDSVKGRFTISRDNSKNTLYLQMNSLRAEDTAVYYCSRHGGNFFDYWGQGTTVTVSS

SEQ ID NO: 3247 - protein, 117 aa, Artificial Sequence
  Description of Artificial Sequence: Synthetic polypeptide
EVQLVESGGGLIQPGGSLRLSCAVSGFTFRSYGMSWVRQAPGKGLEWVALISSGGSYTYYTDSVKGRFTISRDNSKNTLYLQMNSLRAEDTAVYYCSRHGGNFFDYWGQGTTVTVSS

SEQ ID NO: 3248 - protein, 117 aa, Artificial Sequence
  Description of Artificial Sequence: Synthetic polypeptide
EVQLVESGGGLVQPGRSLRLSCAVSGFTFRSYGMSWVRQAPGKGLEWVALISSGGSYTYYTDSVKGRFTISRDNAKNSLYLQMNSLRAEDTALYYCSRHGGNFFDYWGQGTTVTVSS

SEQ ID NO: 3249 - protein, 117 aa, Artificial Sequence
  Description of Artificial Sequence: Synthetic polypeptide
QVQLVESGGGVVQPGRSLRLSCAVSGFTFRSYGMSWVRQAPGKGLEWVALISSGGSYTYYTDSVKGRFTISRDNSKNRLYLQMNSLRAEDTAVYYCSRHGGNFFDYWGQGTTVTVSS

SEQ ID NO: 3250 - protein, 117 aa, Artificial Sequence
  Description of Artificial Sequence: Synthetic polypeptide
QVQLVESGGGVVQPGRSLRLSCAVSGFTFRSYGMSWVRQAPGKGLEWVALISSGGSYTYYTDSVKGRFTISRDNSKNTLYLQMNSLRAEGTAVYYCSRHGGNFFDYWGQGTTVTVSS

SEQ ID NO: 3251 - protein, 117 aa, Artificial Sequence
  Description of Artificial Sequence: Synthetic polypeptide
QVQLVESGGGVVQPGRSLRLSCAVSGFTFRSYGMSWVRQAPGKGLEWVALISSGGSYTYYTDSVKGRFAISRDNSKNTLYLQMNSLRAEDTAVYYCSRHGGNFFDYWGQGTTVTVSS

SEQ ID NO: 3252 - protein, 117 aa, Artificial Sequence
  Description of Artificial Sequence: Synthetic polypeptide
QVQLVDSGGGVVQPGRSLRLSCAVSGFTFRSYGMSWVRQAPGKGLEWVALISSGGSYTYYTDSVKGRFTISRDNSKNTLYLQMNSLRAEDTAVYYCSRHGGNFFDYWGQGTTVTVSS

SEQ ID NO: 3253 - protein, 117 aa, Artificial Sequence
  Description of Artificial Sequence: Synthetic polypeptide
EVQLVESGGGVVRPGGSLRLSCAVSGFTFRSYGMSWVRQAPGKGLEWVALISSGGSYTYYTDSVKGRFTISRDNAKNSLYLQMNSLRAEDTALYHCSRHGGNFFDYWGQGTTVTVSS

SEQ ID NO: 3254 - protein, 117 aa, Artificial Sequence
  Description of Artificial Sequence: Synthetic polypeptide
EVQLVESGGVVVQPGGSLRLSCAVSGFTFRSYGMSWVRQAPGKGLEWVALISSGGSYTYYTDSVKGRFTISRDNSKNSLYLQMNSLRAEDTALYYCSRHGGNFFDYWGQGTTVTVSS

SEQ ID NO: 3255 - protein, 117 aa, Artificial Sequence
  Description of Artificial Sequence: Synthetic polypeptide
EVQLVESGGGVVQPGGSLRLSCAVSGFTFRSYGMSWVRQAPGKGLEWVALISSGGSYTYYTDSVKGRFTISRDNSKNSLYLQMNSLRTEDTALYYCSRHGGNFFDYWGQGTTVTVSS

SEQ ID NO: 3256 - protein, 117 aa, Artificial Sequence
  Description of Artificial Sequence: Synthetic polypeptide
EVQLVESGGVVVQPGGSLRLSCAVSGFTFRSYGMSWVRQAPGKGLEWVALISSGGSYTYYTDSVKGRFTISRDNSKNSLYLQMNSLRTEDTALYYCSRHGGNFFDYWGQGTTVTVSS

SEQ ID NO: 3257 - protein, 117 aa, Artificial Sequence
  Description of Artificial Sequence: Synthetic polypeptide
EVQLVETGGGLIQPGGSLRLSCAVSGFTFRSYGMSWVRQAPGKGLEWVALISSGGSYTYYTDSVKGRFTISRDNSKNTLYLQMNSLRAEDTAVYYCSRHGGNFFDYWGQGTTVTVSS

SEQ ID NO: 3258 - protein, 117 aa, Artificial Sequence
  Description of Artificial Sequence: Synthetic polypeptide
EVQLVESGGGLVQPGGSLRLSCAVSGFTFRSYGMSWVRQATGKGLEWVALISSGGSYTYYTDSVKGRFTISRENAKNSLYLQMNSLRAGDTAVYYCSRHGGNFFDYWGQGTTVTVSS

SEQ ID NO: 3259 - protein, 117 aa, Artificial Sequence
  Description of Artificial Sequence: Synthetic polypeptide
EVQLVESRGVLVQPGGSLRLSCAVSGFTFRSYGMSWVRQAPGKGLEWVALISSGGSYTYYTDSVKGRFTISRDNSKNTLHLQMNSLRAEDTAVYYCSRHGGNFFDYWGQGTTVTVSS

SEQ ID NO: 3260 - protein, 117 aa, Artificial Sequence
  Description of Artificial Sequence: Synthetic polypeptide
EVQLVESGGGLVQPGRSLRLSCAVSGFTFRSYGMSWVRQAPGKGLEWVALISSGGSYTYYTDSVKGRFTISRDNAKNSLYLQMNSLRAEDMALYYCSRHGGNFFDYWGQGTTVTVSS

SEQ ID NO: 3261 - protein, 117 aa, Artificial Sequence
  Description of Artificial Sequence: Synthetic polypeptide
QVQLVESGGGLVQPGGSLRLSCSVSGFTFRSYGMSWVRQAPGKGLEWVALISSGGSYTYYTDSVKGRFTISRDNSKNTLYLQMNSLRAEDTAVYYCSRHGGNFFDYWGQGTTVTVSS

SEQ ID NO: 3262 - protein, 117 aa, Artificial Sequence
  Description of Artificial Sequence: Synthetic polypeptide
EVQLVESGGGLVQPGGSLRLSCSVSGFTFRSYGMSWVRQAPGKGLEWVALISSGGSYTYYTDSVKGRFTISRDNSKNTLYLQMSSLRAEDTAVYYCSRHGGNFFDYWGQGTTVTVSS

SEQ ID NO: 3263 - protein, 117 aa, Artificial Sequence
  Description of Artificial Sequence: Synthetic polypeptide
QVQLVESGGGVVQPGRSLRLSCAVSGFTFRSYGMSWVRQAPGKGLEWVALISSGGSYTYYTDSVKGRFTISRDNSTNTLFLQMNSLRAEDTAVYYCSRHGGNFFDYWGQGTTVTVSS

SEQ ID NO: 3264 - protein, 117 aa, Artificial Sequence
  Description of Artificial Sequence: Synthetic polypeptide
QVQLLESGGGLVKPGGSLRLSCAVSGFTFRSYGMSWVRQAPGKGLEWVALISSGGSYTYYTDSVKGRFTISRDNAKNSLYLQMNSLRAEDTAVYYCSRHGGNFFDYWGQGTTVTVSS

SEQ ID NO: 3265 - protein, 117 aa, Artificial Sequence
  Description of Artificial Sequence: Synthetic polypeptide
EVQLVESGEGLVQPGGSLRLSCAVSGFTFRSYGMSWVRQAPGKGLEWVALISSGGSYTYYTDSVKGRFTISRDNSKNTLYLQMGSLRAEDMAVYYCSRHGGNFFDYWGQGTTVTVSS

SEQ ID NO: 3266 - protein, 117 aa, Artificial Sequence
  Description of Artificial Sequence: Synthetic polypeptide
EVQLVESGGGLVQPGGSLRLSCAVSGFTFRSYGMSWVRQAPGKGLEWVALISSGGSYTYYTDSVKGRFTISRDNSKNTLYLQMGSLRAEDMAVYYCSRHGGNFFDYWGQGTTVTVSS

SEQ ID NO: 3267 - protein, 117 aa, Artificial Sequence
  Description of Artificial Sequence: Synthetic polypeptide
EVQLVESGGGLVQPGGSLRLSCSVSGFTFRSYGMSWVRQAPGKGLEWVALISSGGSYTYYTDSVKGRFTISRDNSKNTLYVQMSSLRAEDTAVYYCSRHGGNFFDYWGQGTTVTVSS

SEQ ID NO: 3268 - protein, 117 aa, Artificial Sequence
  Description of Artificial Sequence: Synthetic polypeptide
EVQLVESGGGLVQPGGSLRLSCAVSGFTFRSYGMSWVRQAPGKGLEWVALISSGGSYTYYTDSVKGRFIISRDNSRNSLYLQKNRRRAEDMAVYYCSRHGGNFFDYWGQGTTVTVSS

SEQ ID NO: 3269 - protein, 117 aa, Artificial Sequence
  Description of Artificial Sequence: Synthetic polypeptide
EVQLVESGGGLVQPGGSLRLSCAVSGFTFRSYGMSWVHQAPGKGLEWVALISSGGSYTYYTDSVKGRFIISRDNSRNTLYLQTNSLRAEDTAVYYCSRHGGNFFDYWGQGTTVTVSS

SEQ ID NO: 3270 - protein, 117 aa, Artificial Sequence
  Description of Artificial Sequence: Synthetic polypeptide
EVHLVESGGGLVQPGGALRLSCAVSGFTFRSYGMSWVRQATGKGLEWVALISSGGSYTYYTDSVKGRFTISRENAKNSLYLQMNSLRAGDTAVYYCSRHGGNFFDYWGQGTTVTVSS

SEQ ID NO: 3271 - protein, 117 aa, Artificial Sequence
  Description of Artificial Sequence: Synthetic polypeptide
EVQLVESGGGLVQPRGSLRLSCAVSGFTFRSYGMSWVRQAPGKGLEWVALISSGGSYTYYTDSVKGRFTISRDNSKNTLYLQMNNLRAEGTAVYYCSRHGGNFFDYWGQGTTVTVSS

SEQ ID NO: 3272 - protein, 117 aa, Artificial Sequence
  Description of Artificial Sequence: Synthetic polypeptide
EVQLVESGGGLVQPRGSLRLSCAVSGFTFRSYGMSWVRQAPGKGLEWVALISSGGSYTYYTDSVKGRFTISRDNSKNTLYLQMNNLRAEGTAAYYCSRHGGNFFDYWGQGTTVTVSS

SEQ ID NO: 3273 - protein, 117 aa, Artificial Sequence
  Description of Artificial Sequence: Synthetic polypeptide
QVQLVQSGAEVKKPGASVKVSCKVSGFTFRSYGMSWVRQAPGKGLEWVALISSGGSYTYYTDSVKGRFTITRDNSTNTLYMELSSLRSEDTAVYYCSRHGGNFFDYWGQGTTVTVSS

SEQ ID NO: 3274 - protein, 117 aa, Artificial Sequence
  Description of Artificial Sequence: Synthetic polypeptide
QVQLVQSGSELKKPGASVKVSCKVSGFTFRSYGMSWVRQAPGQGLEWVALISSGGSYTYYTDSVKGRFVISRDNSVNTLYLQISSLKAEDTAVYYCSRHGGNFFDYWGQGTTVTVSS

SEQ ID NO: 3275-3277 - skipped (3 entries)

SEQ ID NO: 3278 - protein, 469 aa, Artificial Sequence
  Description of Artificial Sequence: Synthetic polypeptide
METDTLLLWVLLLWVPGSTGQVQLVQSGAEVKKPGSSVKVSCKASGYSFTTYYIHWVRQAPGQGLEWMGWFFPGSGNIKYNEKFKGRVTITADTSTSTAYMELSSLRSEDTAVYYCAGSYYSYDVLDYWGQGTTVTVSSASTKGPSVFPLAPSSKSTSGGTAALGCLVKDYFPEPVTVSWNSGALTSGVHTFPAVLQSSGLYSLSSVVTVPSSSLGTQTYICNVNHKPSNTKVDKRVEPKSCDKTHTCPPCPAPELLGGPSVFLFPPKPKDTLMISRTPEVTCVVVDVSHEDPEVKFNWYVDGVEVHNAKTKPREEQYNSTYRVVSVLTVLHQDWLNGKEYKCKVSNKALPAPIEKTISKAKGQPREPQVYTLPPSREEMTKNQVSLTCLVKGFYPSDIAVEWESNGQPENNYKTTPPVLDSDGSFFLYSKLTVDKSRWQQGNVFSCSVMHEALHNHYTQKSLSLSPGK

SEQ ID NO: 3279 - protein, 234 aa, Artificial Sequence
  Description of Artificial Sequence: Synthetic polypeptide
METDTLLLWVLLLWVPGSTGDIQMTQSPSSLSASVGDRVTITCKASQNVGINVVWHQQKPGKVPKALIYSSSHRYSGVPSRFSGSGSGTDFTLTISSLQPEDVATYFCQQFKSYPLTFGQGTKLEIKRTVAAPSVFIFPPSDEQLKSGTASVVCLLNNFYPREAKVQWKVDNALQSGNSQESVTEQDSKDSTYSLSSTLTLSKADYEKHKVYACEVTHQGLSSPVTKSFNRGEC

SEQ ID NO: 3280 - protein, 247 aa, Artificial Sequence
  Description of Artificial Sequence: Synthetic polypeptide
METDTLLLWVLLLWVPGSTGDKTHTCPPCPAPELLGGPSVFLFPPKPKDTLMISRTPEVTCVVVDVSHEDPEVKFNWYVDGVEVHNAKTKPREEQYNSTYRVVSVLTVLHQDWLNGKEYKCKVSNKALPAPIEKTISKAKGQPREPQVYTLPPCREEMTKNQVSLWCLVKGFYPSDIAVEWESNGQPENNYKTTPPVLDSDGSFFLYSKLTVDKSRWQQGNVFSCSVMHEALHNRFTQKSLSLSPGK

SEQ ID NO: 3281 - protein, 520 aa, Artificial Sequence
  Description of Artificial Sequence: Synthetic polypeptide
METDTLLLWVLLLWVPGSTGEVQLVESGGGLVQPGGSLRLSCAASGFTFSNFGMHWVRQAPGKGLEWVSYISSGSSTIYYADTLKGRFTISRDNSKNTLYLQMNSLRAEDTAVYYCARRGEGAMDYWGQGTTVTVSSGGGGSGGGGSGGGGSGGGGSDNQLTQSPSFLSASVGDRVTITCRASSSVNYIYWYQQKPGKAPKLLIYYTSNLAPGVPSRFSGSGSGNEYTLTISSLQPEDFATYYCQQFTSSPFTFGQGTKLEIKGGGGSDKTHTCPPCPAPELLGGPSVFLFPPKPKDTLMISRTPEVTCVVVDVSHEDPEVKFNWYVDGVEVHNAKTKPREEQYNSTYRVVSVLTVLHQDWLNGKEYKCKVSNKALPAPIEKTISKAKGQPREPQVCTLPPSREEMTKNQVSLSCAVKGFYPSDIAVEWESNGQPENNYKTTPPVLDSDGSFFLVSKLTVDKSRWQQGNVFSCSVMHEALHNHYTQKSLSLSPGKGGGGSGGGGSGLNDIFEAQKIEWHE

SEQ ID NO: 3282 - protein, 284 aa, Artificial Sequence
  Description of Artificial Sequence: Synthetic polypeptide
METDTLLLWVLLLWVPGSTGGLNDIFEAQKIEWHEGGGGSEPRTDTDTCPNPPDPCPTCPTPDLLGGPSVFIFPPKPKDVLMISLTPKITCVVVDVSEEEPDVQFNWYVNNVEDKTAQTETRQRQYNSTYRVVSVLPIKHQDWMSGKVFKCKVNNNALPSPIEKTISKPRGQVRVPQIYTFPPPIEQTVKKDVSVTCLVTGFLPQDIHVEWESNGQPQPEQNYKNTQPVLDSDGSYFLYSKLNVPKSRWDQGDSFTCSVIHEALHNHHMTKTISRSLGNGGGGS

SEQ ID NO: 3283 - skipped

SEQ ID NO: 3284 - protein, 469 aa, Artificial Sequence
  Description of Artificial Sequence: Synthetic polypeptide
METDTLLLWVLLLWVPGSTGQVQLQQSGPELVKPGASVKISCKASGYAFSSSWMNWVKQRPGQGLEWIGRIYPGDGDTKYNGKFKGKATLTADKSSSTAYMHLSSLTSVDSAVYFCARRGTGGWYFDVWGAGTTVTVSSAKTTAPSVYPLAPVCGDTTGSSVTLGCLVKGYFPEPVTLTWNSGSLSSGVHTFPAVLQSDLYTLSSSVTVTSSTWPSQSITCNVAHPASSTKVDKKIEPRGPTIKPCPPCKCPAPNLLGGPSVFIFPPKIKDVLMISLSPIVTCVVVDVSEDDPDVQISWFVNNVEVHTAQTQTHREDYNSTLRVVSALPIQHQDWMSGKEFKCKVNNKDLPAPIERTISKPKGSVRAPQVYVLPPPEEEMTKKQVTLTCMVTDFMPEDIYVEWTNNGKTELNYKNTEPVLDSDGSYFMYSKLRVEKKNWVERNSYSCSVVHEGLHNHHTTKSFSRTPGK

SEQ ID NO: 3285 - protein, 238 aa, Artificial Sequence
  Description of Artificial Sequence: Synthetic polypeptide
METDTLLLWVLLLWVPGSTGDIVLTQSPASLAVSLGQRATISCRASESVDSSGNSFMHWYQQKPGQPPQLLIYRASNLESGIPARFSGSGSRTDFTLTINPVEADDVATFYCQQSFDDPFTFGSGTKLEIKRADAAPTVSIFPPSSEQLTSGGASVVCFLNNFYPKDINVKWKIDGSERQNGVLNSWTDQDSKDSTYSMSSTLTLTKDEYERHNSYTCEATHKTSTSPIVKSFNRNEC

SEQ ID NO: 3286-3288 - skipped (3 entries)

SEQ ID NO: 3289 - protein, 107 aa, Artificial Sequence; identical to SEQ ID NO: 259
  Description of Artificial Sequence: Synthetic polypeptide
  MOD_RES (30)..(30): G, E, A, or D
  MOD_RES (31)..(31): N or D
  MOD_RES (32)..(32): R or K
  MOD_RES (36)..(36): Y or H
  MOD_RES (56)..(56): K or S

SEQ ID NO: 3290 - protein, 119 aa, Artificial Sequence; identical to SEQ ID NO: 260
  Description of Artificial Sequence: Synthetic polypeptide
  MOD_RES (27)..(27): H, T, G, or Y
  MOD_RES (28)..(28): D, T, or S
  MOD_RES (30)..(30): H, R, D, K, or T
  MOD_RES (31)..(31): L, D, K, T, or N
  MOD_RES (32)..(32): W, F, T, I, Y, or G
  MOD_RES (50)..(50): R or W
  MOD_RES (51)..(51): V, I, or F
  MOD_RES (52)..(52): F, S, or Y
  MOD_RES (53)..(53): A or P
  MOD_RES (57)..(57): N or S
  MOD_RES (58)..(58): T, V, Y, or I
  MOD_RES (59)..(59): K or R
  MOD_RES (98)..(98): G or V
  MOD_RES (100)..(100): Y or I
  MOD_RES (103)..(103): Y or A
  MOD_RES (104)..(104): D or G

SEQ ID NO: 3291-3376 - skipped (86 entries)

SEQ ID NO: 3377 - protein, 107 aa, Artificial Sequence; identical to SEQ ID NO: 93
  Description of Artificial Sequence: Synthetic polypeptide

SEQ ID NO: 3378 - protein, 107 aa, Artificial Sequence; identical to SEQ ID NO: 117
  Description of Artificial Sequence: Synthetic polypeptide

SEQ ID NO: 3379 - protein, 107 aa, Artificial Sequence; identical to SEQ ID NO: 199
  Description of Artificial Sequence: Synthetic polypeptide

SEQ ID NO: 3380 - protein, 107 aa, Artificial Sequence; identical to SEQ ID NO: 181
  Description of Artificial Sequence: Synthetic polypeptide

SEQ ID NO: 3381 - protein, 107 aa, Artificial Sequence; identical to SEQ ID NO: 87
  Description of Artificial Sequence: Synthetic polypeptide

SEQ ID NO: 3382 - protein, 107 aa, Artificial Sequence; identical to SEQ ID NO: 160
  Description of Artificial Sequence: Synthetic polypeptide

SEQ ID NO: 3383 - protein, 107 aa, Artificial Sequence; identical to SEQ ID NO: 147
  Description of Artificial Sequence: Synthetic polypeptide

SEQ ID NO: 3384 - protein, 107 aa, Artificial Sequence; identical to SEQ ID NO: 141
  Description of Artificial Sequence: Synthetic polypeptide

SEQ ID NO: 3385 - protein, 107 aa, Artificial Sequence; identical to SEQ ID NO: 81
  Description of Artificial Sequence: Synthetic polypeptide

SEQ ID NO: 3386 - protein, 107 aa, Artificial Sequence; identical to SEQ ID NO: 90
  Description of Artificial Sequence: Synthetic polypeptide

SEQ ID NO: 3387 - protein, 107 aa, Artificial Sequence; identical to SEQ ID NO: 102
  Description of Artificial Sequence: Synthetic polypeptide

SEQ ID NO: 3388 - protein, 107 aa, Artificial Sequence; identical to SEQ ID NO: 99
  Description of Artificial Sequence: Synthetic polypeptide

SEQ ID NO: 3389 - protein, 107 aa, Artificial Sequence; identical to SEQ ID NO: 108
  Description of Artificial Sequence: Synthetic polypeptide

SEQ ID NO: 3390 - protein, 119 aa, Artificial Sequence; identical to SEQ ID NO: 221
  Description of Artificial Sequence: Synthetic polypeptide

SEQ ID NO: 3391 - protein, 119 aa, Artificial Sequence; identical to SEQ ID NO: 223
  Description of Artificial Sequence: Synthetic polypeptide

SEQ ID NO: 3392 - protein, 119 aa, Artificial Sequence; identical to SEQ ID NO: 225
  Description of Artificial Sequence: Synthetic polypeptide

SEQ ID NO: 3393 - protein, 119 aa, Artificial Sequence; identical to SEQ ID NO: 219
  Description of Artificial Sequence: Synthetic polypeptide

SEQ ID NO: 3394 - protein, 119 aa, Artificial Sequence; identical to SEQ ID NO: 217
  Description of Artificial Sequence: Synthetic polypeptide

SEQ ID NO: 3395 - protein, 119 aa, Artificial Sequence; identical to SEQ ID NO: 211
  Description of Artificial Sequence: Synthetic polypeptide

SEQ ID NO: 3396 - protein, 119 aa, Artificial Sequence; identical to SEQ ID NO: 215
  Description of Artificial Sequence: Synthetic polypeptide

SEQ ID NO: 3397 - protein, 119 aa, Artificial Sequence; identical to SEQ ID NO: 213
  Description of Artificial Sequence: Synthetic polypeptide

SEQ ID NO: 3398 - protein, 119 aa, Artificial Sequence; identical to SEQ ID NO: 207
  Description of Artificial Sequence: Synthetic polypeptide

SEQ ID NO: 3399 - protein, 119 aa, Artificial Sequence; identical to SEQ ID NO: 209
  Description of Artificial Sequence: Synthetic polypeptide

SEQ ID NO: 3400 - protein, 119 aa, Artificial Sequence; identical to SEQ ID NO: 121
  Description of Artificial Sequence: Synthetic polypeptide

SEQ ID NO: 3401 - protein, 119 aa, Artificial Sequence; identical to SEQ ID NO: 182
  Description of Artificial Sequence: Synthetic polypeptide

SEQ ID NO: 3402 - protein, 119 aa, Artificial Sequence; identical to SEQ ID NO: 176
  Description of Artificial Sequence: Synthetic polypeptide

SEQ ID NO: 3403 - protein, 119 aa, Artificial Sequence; identical to SEQ ID NO: 158
  Description of Artificial Sequence: Synthetic polypeptide

SEQ ID NO: 3404 - protein, 119 aa, Artificial Sequence; identical to SEQ ID NO: 155
  Description of Artificial Sequence: Synthetic polypeptide

SEQ ID NO: 3405 - protein, 119 aa, Artificial Sequence; identical to SEQ ID NO: 118
  Description of Artificial Sequence: Synthetic polypeptide

SEQ ID NO: 3406 - protein, 119 aa, Artificial Sequence; identical to SEQ ID NO: 82
  Description of Artificial Sequence: Synthetic polypeptide

SEQ ID NO: 3407 - protein, 119 aa, Artificial Sequence; identical to SEQ ID NO: 106
  Description of Artificial Sequence: Synthetic polypeptide

SEQ ID NO: 3408 - protein, 119 aa, Artificial Sequence; identical to SEQ ID NO: 200
  Description of Artificial Sequence: Synthetic polypeptide

SEQ ID NO: 3409 - protein, 119 aa, Artificial Sequence; identical to SEQ ID NO: 124
  Description of Artificial Sequence: Synthetic polypeptide

SEQ ID NO: 3410 - protein, 119 aa, Artificial Sequence; identical to SEQ ID NO: 94
  Description of Artificial Sequence: Synthetic polypeptide

SEQ ID NO: 3411 - protein, 119 aa, Artificial Sequence; identical to SEQ ID NO: 151
  Description of Artificial Sequence: Synthetic polypeptide

SEQ ID NO: 3412 - protein, 119 aa, Artificial Sequence; identical to SEQ ID NO: 197
  Description of Artificial Sequence: Synthetic polypeptide

SEQ ID NO: 3413 - protein, 119 aa, Artificial Sequence; identical to SEQ ID NO: 130
  Description of Artificial Sequence: Synthetic polypeptide

SEQ ID NO: 3414 - protein, 119 aa, Artificial Sequence; identical to SEQ ID NO: 173
  Description of Artificial Sequence: Synthetic polypeptide

SEQ ID NO: 3415 - protein, 119 aa, Artificial Sequence; identical to SEQ ID NO: 142
  Description of Artificial Sequence: Synthetic polypeptide

SEQ ID NO: 3416 - protein, 119 aa, Artificial Sequence; identical to SEQ ID NO: 91
  Description of Artificial Sequence: Synthetic polypeptide

SEQ ID NO: 3417 - protein, 119 aa, Artificial Sequence; identical to SEQ ID NO: 139
  Description of Artificial Sequence: Synthetic polypeptide

SEQ ID NO: 3418 - protein, 119 aa, Artificial Sequence; identical to SEQ ID NO: 185
  Description of Artificial Sequence: Synthetic polypeptide

SEQ ID NO: 3419 - protein, 119 aa, Artificial Sequence; identical to SEQ ID NO: 133
  Description of Artificial Sequence: Synthetic polypeptide

SEQ ID NO: 3420 - protein, 119 aa, Artificial Sequence; identical to SEQ ID NO: 188
  Description of Artificial Sequence: Synthetic polypeptide

SEQ ID NO: 3421 - protein, 119 aa, Artificial Sequence; identical to SEQ ID NO: 109
  Description of Artificial Sequence: Synthetic polypeptide

SEQ ID NO: 3422 - protein, 119 aa, Artificial Sequence; identical to SEQ ID NO: 97
  Description of Artificial Sequence: Synthetic polypeptide

SEQ ID NO: 3423 - protein, 119 aa, Artificial Sequence; identical to SEQ ID NO: 85
  Description of Artificial Sequence: Synthetic polypeptide

SEQ ID NO: 3424 - protein, 119 aa, Artificial Sequence; identical to SEQ ID NO: 115
  Description of Artificial Sequence: Synthetic polypeptide

SEQ ID NO: 3425 - protein, 119 aa, Artificial Sequence; identical to SEQ ID NO: 191
  Description of Artificial Sequence: Synthetic polypeptide

SEQ ID NO: 3426 - protein, 119 aa, Artificial Sequence; identical to SEQ ID NO: 136
  Description of Artificial Sequence: Synthetic polypeptide

SEQ ID NO: 3427 - protein, 119 aa, Artificial Sequence; identical to SEQ ID NO: 203
  Description of Artificial Sequence: Synthetic polypeptide

SEQ ID NO: 3428 - protein, 119 aa, Artificial Sequence; identical to SEQ ID NO: 103
  Description of Artificial Sequence: Synthetic polypeptide

SEQ ID NO: 3429 - protein, 119 aa, Artificial Sequence; identical to SEQ ID NO: 205
  Description of Artificial Sequence: Synthetic polypeptide

SEQ ID NO: 3430 - protein, 119 aa, Artificial Sequence; identical to SEQ ID NO: 100
  Description of Artificial Sequence: Synthetic polypeptide

SEQ ID NO: 3431 - protein, 119 aa, Artificial Sequence; identical to SEQ ID NO: 179
  Description of Artificial Sequence: Synthetic polypeptide

SEQ ID NO: 3432 - protein, 119 aa, Artificial Sequence; identical to SEQ ID NO: 88
  Description of Artificial Sequence: Synthetic polypeptide

SEQ ID NO: 3433 - protein, 119 aa, Artificial Sequence; identical to SEQ ID NO: 167
  Description of Artificial Sequence: Synthetic polypeptide

SEQ ID NO: 3434 - protein, 119 aa, Artificial Sequence; identical to SEQ ID NO: 161
  Description of Artificial Sequence: Synthetic polypeptide

SEQ ID NO: 3435 - protein, 119 aa, Artificial Sequence; identical to SEQ ID NO: 145
  Description of Artificial Sequence: Synthetic polypeptide

SEQ ID NO: 3436 - protein, 119 aa, Artificial Sequence; identical to SEQ ID NO: 148
  Description of Artificial Sequence: Synthetic polypeptide

SEQ ID NO: 3437 - skipped

SEQ ID NO: 3438 - protein, 117 aa, Artificial Sequence
  Description of Artificial Sequence: Synthetic polypeptide
EVQLVESGGGLVQPGGSLRLSCAASGFTFSNFGMHWVRQAPGKGLEWVSYISSGSSTIYYADTLKGRFTISRDNAKNSLYLQMNSLRAEDTAVYYCARRGEGAMDYWGQGTTVTVSS

SEQ ID NO: 3439-5999 - skipped (2561 entries)

SEQ ID NO: 6000 - protein, 7 aa, Artificial Sequence
  Description of Artificial Sequence: Synthetic peptide
TGGYHWN

SEQ ID NO: 6001 - protein, 16 aa, Artificial Sequence
  Description of Artificial Sequence: Synthetic peptide
YIYSSGSTSYNPSLKS

SEQ ID NO: 6002 - protein, 8 aa, Artificial Sequence
  Description of Artificial Sequence: Synthetic peptide
GNWHYFDF

SEQ ID NO: 6003 - protein, 30 aa, Artificial Sequence
  Description of Artificial Sequence: Synthetic polypeptide
QIQLQESGPGLVKPSQSLSLTCSVTGFSIN

SEQ ID NO: 6004 - protein, 14 aa, Artificial Sequence
  Description of Artificial Sequence: Synthetic peptide
WIRQFPGKKLEWMG

SEQ ID NO: 6005 - protein, 32 aa, Artificial Sequence
  Description of Artificial Sequence: Synthetic polypeptide
RISITRDTSKNQFFLQLNSVTTEDTATYYCAR

SEQ ID NO: 6006 - protein, 11 aa, Artificial Sequence
  Description of Artificial Sequence: Synthetic peptide
WGQGTMVTVSS

SEQ ID NO: 6007 - protein, 7 aa, Artificial Sequence
  Description of Artificial Sequence: Synthetic peptide
TGGYHWN

SEQ ID NO: 6008 - protein, 16 aa, Artificial Sequence
  Description of Artificial Sequence: Synthetic peptide
YIYSSGTTRYNPSLKS

SEQ ID NO: 6009 - protein, 8 aa, Artificial Sequence
  Description of Artificial Sequence: Synthetic peptide
GNWHYFDY

SEQ ID NO: 6010 - protein, 30 aa, Artificial Sequence; identical to SEQ ID NO: 6003
  Description of Artificial Sequence: Synthetic polypeptide

SEQ ID NO: 6011 - protein, 14 aa, Artificial Sequence
  Description of Artificial Sequence: Synthetic peptide
WIRQFPGKKLEWMG

SEQ ID NO: 6012 - protein, 32 aa, Artificial Sequence
  Description of Artificial Sequence: Synthetic polypeptide
RISITRDTSKNQFFLQLNSVTPEDTATYYCTR

SEQ ID NO: 6013 - protein, 11 aa, Artificial Sequence
  Description of Artificial Sequence: Synthetic peptide
WGQGTLVAVSS

SEQ ID NO: 6014 - protein, 30 aa, Artificial Sequence
  Description of Artificial Sequence: Synthetic polypeptide
QIQLQESGPGLVKPSETLSLTCTVSGFSIN

SEQ ID NO: 6015 - protein, 14 aa, Artificial Sequence
  Description of Artificial Sequence: Synthetic peptide
WIRQPAGKGLEWIG

SEQ ID NO: 6016 - protein, 32 aa, Artificial Sequence
  Description of Artificial Sequence: Synthetic polypeptide
RVTMSRDTSKNQFSLKLSSVTAADTAVYYCAR

SEQ ID NO: 6017 - protein, 11 aa, Artificial Sequence
  Description of Artificial Sequence: Synthetic peptide
WGQGTMVTVSS

SEQ ID NO: 6018 - protein, 30 aa, Artificial Sequence
  Description of Artificial Sequence: Synthetic polypeptide
QIQLQESGPGLVKPSQTLSLTCTVSGFSIN

SEQ ID NO: 6019 - protein, 14 aa, Artificial Sequence
  Description of Artificial Sequence: Synthetic peptide
WIRQHPGKGLEWIG

SEQ ID NO: 6020 - protein, 32 aa, Artificial Sequence
  Description of Artificial Sequence: Synthetic polypeptide
LVTISRDTSKNQFSLKLSSVTAADTAVYYCAR

SEQ ID NO: 6021 - protein, 11 aa, Artificial Sequence
  Description of Artificial Sequence: Synthetic peptide
WGQGTMVTVSS

SEQ ID NO: 6022 - protein, 30 aa, Artificial Sequence
  Description of Artificial Sequence: Synthetic polypeptide
EIQLLESGGGLVQPGGSLRLSCAVSGFSIN

SEQ ID NO: 6023 - protein, 14 aa, Artificial Sequence
  Description of Artificial Sequence: Synthetic peptide
WVRQAPGKGLEWVG

SEQ ID NO: 6024 - protein, 32 aa, Artificial Sequence
  Description of Artificial Sequence: Synthetic polypeptide
RFTISRDTSKNTFYLQMNSLRAEDTAVYYCAR

SEQ ID NO: 6025 - protein, 11 aa, Artificial Sequence
  Description of Artificial Sequence: Synthetic peptide
WGQGTMVTVSS

SEQ ID NO: 6026 - protein, 30 aa, Artificial Sequence
  Description of Artificial Sequence: Synthetic polypeptide
QIQLVQSGAEVKKPGSSVKVSCKVSGFSIN

SEQ ID NO: 6027 - protein, 14 aa, Artificial Sequence
  Description of Artificial Sequence: Synthetic peptide
WVRQAPGQGLEWMG

SEQ ID NO: 6028 - protein, 32 aa, Artificial Sequence
  Description of Artificial Sequence: Synthetic polypeptide
RVTITRDTSTNTFYMELSSLRSEDTAVYYCAR

SEQ ID NO: 6029 - protein, 11 aa, Artificial Sequence
  Description of Artificial Sequence: Synthetic peptide
WGQGTMVTVSS

SEQ ID NO: 6030 - protein, 30 aa, Artificial Sequence
  Description of Artificial Sequence: Synthetic polypeptide
EIQLVESGGGLVQPGGSLRLSCAVSGFSIN

SEQ ID NO: 6031 - skipped

SEQ ID NO: 6032 - protein, 14 aa, Artificial Sequence
  Description of Artificial Sequence: Synthetic peptide
WVRQAPGKGLEWVG

SEQ ID NO: 6033 - protein, 32 aa, Artificial Sequence
  Description of Artificial Sequence: Synthetic polypeptide
RFTISRDTAKNSFYLQMNSLRAEDTAVYYCAR

SEQ ID NO: 6034 - protein, 11 aa, Artificial Sequence
  Description of Artificial Sequence: Synthetic peptide
WGQGTMVTVSS

SEQ ID NO: 6035 - protein, 30 aa, Artificial Sequence
  Description of Artificial Sequence: Synthetic polypeptide
QIQLVQSGAEVKKPGASVKVSCKVSGFSIN

SEQ ID NO: 6036 - protein, 14 aa, Artificial Sequence
  Description of Artificial Sequence: Synthetic peptide
WVRQAPGQGLEWMG

SEQ ID NO: 6037 - protein, 32 aa, Artificial Sequence
  Description of Artificial Sequence: Synthetic polypeptide
RVTMTRDTSTNTFYMELSSLRSEDTAVYYCAR

SEQ ID NO: 6038 - protein, 11 aa, Artificial Sequence
  Description of Artificial Sequence: Synthetic peptide
WGQGTMVTVSS

SEQ ID NO: 6039 - protein, 30 aa, Artificial Sequence; identical to SEQ ID NO: 6018
  Description of Artificial Sequence: Synthetic polypeptide

SEQ ID NO: 6040 - protein, 14 aa, Artificial Sequence
  Description of Artificial Sequence: Synthetic peptide
WIRQHPGKGLEWIG

SEQ ID NO: 6041 - protein, 32 aa, Artificial Sequence; identical to SEQ ID NO: 6020
  Description of Artificial Sequence: Synthetic polypeptide

SEQ ID NO: 6042 - protein, 11 aa, Artificial Sequence
  Description of Artificial Sequence: Synthetic peptide
WGQGTLVTVSS

SEQ ID NO: 6043 - protein, 30 aa, Artificial Sequence; identical to SEQ ID NO: 6014
  Description of Artificial Sequence: Synthetic polypeptide

SEQ ID NO: 6044 - protein, 14 aa, Artificial Sequence
  Description of Artificial Sequence: Synthetic peptide
WIRQPAGKGLEWIG

SEQ ID NO: 6045 - protein, 32 aa, Artificial Sequence; identical to SEQ ID NO: 6016
  Description of Artificial Sequence: Synthetic polypeptide

SEQ ID NO: 6046 - protein, 11 aa, Artificial Sequence
  Description of Artificial Sequence: Synthetic peptide
WGQGTLVTVSS

SEQ ID NO: 6047 - protein, 30 aa, Artificial Sequence; identical to SEQ ID NO: 6022
  Description of Artificial Sequence: Synthetic polypeptide

SEQ ID NO: 6048 - protein, 14 aa, Artificial Sequence
  Description of Artificial Sequence: Synthetic peptide
WVRQAPGKGLEWVG

SEQ ID NO: 6049 - protein, 32 aa, Artificial Sequence; identical to SEQ ID NO: 6024
  Description of Artificial Sequence: Synthetic polypeptide

SEQ ID NO: 6050 - protein, 11 aa, Artificial Sequence
  Description of Artificial Sequence: Synthetic peptide
WGQGTLVTVSS

SEQ ID NO: 6051 - protein, 30 aa, Artificial Sequence
  Description of Artificial Sequence: Synthetic polypeptide
QIQLVESGGGLVKPGGSLRLSCAVSGFSIN

SEQ ID NO: 6052 - protein, 14 aa, Artificial Sequence
  Description of Artificial Sequence: Synthetic peptide
WIRQAPGKGLEWVG

SEQ ID NO: 6053 - protein, 32 aa, Artificial Sequence; identical to SEQ ID NO: 6033
  Description of Artificial Sequence: Synthetic polypeptide

SEQ ID NO: 6054 - protein, 11 aa, Artificial Sequence
  Description of Artificial Sequence: Synthetic peptide
WGQGTLVTVSS

SEQ ID NO: 6055 - protein, 30 aa, Artificial Sequence; identical to SEQ ID NO: 6035
  Description of Artificial Sequence: Synthetic polypeptide

SEQ ID NO: 6056 - protein, 14 aa, Artificial Sequence
  Description of Artificial Sequence: Synthetic peptide
WVRQAPGQGLEWMG

SEQ ID NO: 6057 - protein, 32 aa, Artificial Sequence; identical to SEQ ID NO: 6037
  Description of Artificial Sequence: Synthetic polypeptide

SEQ ID NO: 6058 - protein, 11 aa, Artificial Sequence
  Description of Artificial Sequence: Synthetic peptide
WGQGTLVTVSS

SEQ ID NO: 6059 - protein, 30 aa, Artificial Sequence
  Description of Artificial Sequence: Synthetic polypeptide
EIQLVQSGAEVKKPGATVKISCKVSGFSIN

SEQ ID NO: 6060 - protein, 14 aa, Artificial Sequence
  Description of Artificial Sequence: Synthetic peptide
WVQQAPGKGLEWMG

SEQ ID NO: 6061 - protein, 32 aa, Artificial Sequence; identical to SEQ ID NO: 6028
  Description of Artificial Sequence: Synthetic polypeptide

SEQ ID NO: 6062 - protein, 11 aa, Artificial Sequence
  Description of Artificial Sequence: Synthetic peptide
WGQGTLVTVSS

SEQ ID NO: 6063 - protein, 11 aa, Artificial Sequence
  Description of Artificial Sequence: Synthetic peptide
SGERLSDKYVH

SEQ ID NO: 6064 - protein, 7 aa, Artificial Sequence
  Description of Artificial Sequence: Synthetic peptide
ENDKRPS

SEQ ID NO: 6065 - protein, 10 aa, Artificial Sequence
  Description of Artificial Sequence: Synthetic peptide
QAGYEADYYC

SEQ ID NO: 6066 - protein, 22 aa, Artificial Sequence
  Description of Artificial Sequence: Synthetic peptide
SYTLTQPPLLSVALGHKATITC

SEQ ID NO: 6067 - protein, 15 aa, Artificial Sequence
  Description of Artificial Sequence: Synthetic peptide
WYQQKPGRAPVMVIY

SEQ ID NO: 6068 - protein, 22 aa, Artificial Sequence
  Description of Artificial Sequence: Synthetic peptide
GIPDQFSGSNSGNIATLTISKA

SEQ ID NO: 6069 - protein, 10 aa, Artificial Sequence
  Description of Artificial Sequence: Synthetic peptide
FGSGTQLTVL

SEQ ID NO: 6070 - protein, 11 aa, Artificial Sequence
  Description of Artificial Sequence: Synthetic peptide
SGENLSDKYVH

SEQ ID NO: 6071 - protein, 7 aa, Artificial Sequence
  Description of Artificial Sequence: Synthetic peptide
ENEKRPS

SEQ ID NO: 6072 - protein, 10 aa, Artificial Sequence
  Description of Artificial Sequence: Synthetic peptide
HYWESINSVV

SEQ ID NO: 6073 - protein, 22 aa, Artificial Sequence
  Description of Artificial Sequence: Synthetic peptide
SYTLTQPPSLSVAPGQKATIIC

SEQ ID NO: 6074 - protein, 15 aa, Artificial Sequence
  Description of Artificial Sequence: Synthetic peptide
WYQQKPGRAPVMVIY

SEQ ID NO: 6075 - protein, 32 aa, Artificial Sequence
  Description of Artificial Sequence: Synthetic polypeptide
GIPDQFSGSNSGNIATLTISKAQPGSEADYYC

SEQ ID NO: 6076 - protein, 10 aa, Artificial Sequence
  Description of Artificial Sequence: Synthetic peptide
FGSGTHLTVL

SEQ ID NO: 6077 - protein, 22 aa, Artificial Sequence
  Description of Artificial Sequence: Synthetic peptide
QSVTTQPPSVSGAPGQRVTISC

SEQ ID NO: 6078 - protein, 15 aa, Artificial Sequence
  Description of Artificial Sequence: Synthetic peptide
WYQQLPGTAPKMLIY

SEQ ID NO: 6079 - protein, 32 aa, Artificial Sequence
  Description of Artificial Sequence: Synthetic polypeptide
GVPDRFSGSNSGNSASLAITGLQAEDEADYYC

SEQ ID NO: 6080 - protein, 10 aa, Artificial Sequence
  Description of Artificial Sequence: Synthetic peptide
FGGGTQLTVL

SEQ ID NO: 6081 - protein, 22 aa, Artificial Sequence
  Description of Artificial Sequence: Synthetic peptide
QSVTTQPPSASGTPGQRVTISC

SEQ ID NO: 6082 - protein, 15 aa, Artificial Sequence
  Description of Artificial Sequence: Synthetic peptide
WYQQLPGTAPKMLIY

SEQ ID NO: 6083 - protein, 32 aa, Artificial Sequence
  Description of Artificial Sequence: Synthetic polypeptide
GVPDRFSGSNSGNSASLAISGLQSEDEADYYC

SEQ ID NO: 6084 - protein, 10 aa, Artificial Sequence
  Description of Artificial Sequence: Synthetic peptide
FGGGTQLTVL

SEQ ID NO: 6085 - protein, 22 aa, Artificial Sequence
  Description of Artificial Sequence: Synthetic peptide
QSVTTQPPSASGTPGQRVTISC

SEQ ID NO: 6086 - protein, 15 aa, Artificial Sequence
  Description of Artificial Sequence: Synthetic peptide
WYQQLPGTAPKMLIY

SEQ ID NO: 6087 - protein, 32 aa, Artificial Sequence
  Description of Artificial Sequence: Synthetic polypeptide
GVPDRFSGSNSGNSASLAISGLRSEDEADYYC

SEQ ID NO: 6088 - protein, 10 aa, Artificial Sequence
  Description of Artificial Sequence: Synthetic peptide
FGGGTQLTVL

SEQ ID NO: 6089 - protein, 22 aa, Artificial Sequence
  Description of Artificial Sequence: Synthetic peptide
SSETTQPHSVSVATAQMARITC

SEQ ID NO: 6090 - protein, 15 aa, Artificial Sequence
  Description of Artificial Sequence: Synthetic peptide
WYQQKPGQDPVMVIY

SEQ ID NO: 6091 - protein, 32 aa, Artificial Sequence
  Description of Artificial Sequence: Synthetic polypeptide
GIPERFSGSNPGNTATLTISRIEAGDEADYYC

SEQ ID NO: 6092 - protein, 10 aa, Artificial Sequence
  Description of Artificial Sequence: Synthetic peptide
FGGGTQLTVL

SEQ ID NO: 6093 - protein, 23 aa, Artificial Sequence
  Description of Artificial Sequence: Synthetic peptide
DIQMTQSPSTLSASVGDRVTITC

SEQ ID NO: 6094 - protein, 15 aa, Artificial Sequence
  Description of Artificial Sequence: Synthetic peptide
WYQQKPGKAPKMLIY

SEQ ID NO: 6095 - protein, 32 aa, Artificial Sequence
  Description of Artificial Sequence: Synthetic polypeptide
GVPSRFSGSNSGNEATLTISSLQPDDFATYYC

SEQ ID NO: 6096 - protein, 10 aa, Artificial Sequence
  Description of Artificial Sequence: Synthetic peptide
FGQGTKVEIK

SEQ ID NO: 6097 - protein, 22 aa, Artificial Sequence
  Description of Artificial Sequence: Synthetic peptide
QYVLTQPPSASGTPGQRVTISC

SEQ ID NO: 6098 - protein, 15 aa, Artificial Sequence
  Description of Artificial Sequence: Synthetic peptide
WYQQLPGTAPKMLIY

SEQ ID NO: 6099 - protein, 32 aa, Artificial Sequence; identical to SEQ ID NO: 6083
  Description of Artificial Sequence: Synthetic polypeptide

SEQ ID NO: 6100 - protein, 10 aa, Artificial Sequence
  Description of Artificial Sequence: Synthetic peptide
FGEGTELTVL

SEQ ID NO: 6101 - protein, 22 aa, Artificial Sequence
  Description of Artificial Sequence: Synthetic peptide
QYVLTQPPSASGTPGQRVTISC

SEQ ID NO: 6102 - protein, 15 aa, Artificial Sequence
  Description of Artificial Sequence: Synthetic peptide
WYQQLPGTAPKMLIY

SEQ ID NO: 6103 - protein, 32 aa, Artificial Sequence; identical to SEQ ID NO: 6087
  Description of Artificial Sequence: Synthetic polypeptide

SEQ ID NO: 6104 - protein, 10 aa, Artificial Sequence
  Description of Artificial Sequence: Synthetic peptide
FGEGTELTVL

SEQ ID NO: 6105 - protein, 22 aa, Artificial Sequence
  Description of Artificial Sequence: Synthetic peptide
SYELTQPPSVSVSPGQTASITC

SEQ ID NO: 6106 - protein, 15 aa, Artificial Sequence
  Description of Artificial Sequence: Synthetic peptide
WYQQKPGQSPVMVIY

SEQ ID NO: 6107 - protein, 32 aa, Artificial Sequence
  Description of Artificial Sequence: Synthetic polypeptide
GIPERFSGSNSGNTATLTISGTQAMDEADYYC

SEQ ID NO: 6108 - protein, 10 aa, Artificial Sequence
  Description of Artificial Sequence: Synthetic peptide
FGEGTELTVL

SEQ ID NO: 6109 - protein, 23 aa, Artificial Sequence
  Description of Artificial Sequence: Synthetic peptide
DYVLTQSPLSLPVTPGEPASISC

SEQ ID NO: 6110 - protein, 15 aa, Artificial Sequence
  Description of Artificial Sequence: Synthetic peptide
WYLQKPGQSPQMLIY

SEQ ID NO: 6111 - protein, 32 aa, Artificial Sequence
  Description of Artificial Sequence: Synthetic polypeptide
GVPDRFSGSNSGNDATLKISRVEAEDVGVYYC

SEQ ID NO: 6112 - protein, 10 aa, Artificial Sequence
  Description of Artificial Sequence: Synthetic peptide
FGQGTKVEIK

SEQ ID NO: 6113 - protein, 23 aa, Artificial Sequence
  Description of Artificial Sequence: Synthetic peptide
AYQLTQSPSSLSASVGDRVTITC

SEQ ID NO: 6114 - protein, 15 aa, Artificial Sequence
  Description of Artificial Sequence: Synthetic peptide
WYQQKPGKAPKMLIY

SEQ ID NO: 6115 - protein, 32 aa, Artificial Sequence
  Description of Artificial Sequence: Synthetic polypeptide
GVPSRFSGSNSGNDATLTISSLQPEDFATYYC

SEQ ID NO: 6116 - protein, 10 aa, Artificial Sequence
  Description of Artificial Sequence: Synthetic peptide
FGQGTKVEIK

SEQ ID NO: 6117 - protein, 23 aa, Artificial Sequence
  Description of Artificial Sequence: Synthetic peptide
EYVLTQSPATLSVSPGERATLSC

SEQ ID NO: 6118 - protein, 15 aa, Artificial Sequence
  Description of Artificial Sequence: Synthetic peptide
WYQQKPGQAPRMLIY

SEQ ID NO: 6119 - protein, 32 aa, Artificial Sequence
  Description of Artificial Sequence: Synthetic polypeptide
GIPARFSGSNSGNEATLTISSLQSEDFAVYYC

SEQ ID NO: 6120 - protein, 10 aa, Artificial Sequence
  Description of Artificial Sequence: Synthetic peptide
FGQGTKVEIK

SEQ ID NO: 6121 - protein, 118 aa, Artificial Sequence
  Description of Artificial Sequence: Synthetic polypeptide
QIQLQESGPGLVKPSQSLSLTCSVTGFSINTGGYHWNWIRQFPGKKLEWMGYIYSSGSTSYNPSLKSRISITRDTSKNQFFLQLNSVTTEDTATYYCARGNWHYFDFWGQGTMVTVSS

SEQ ID NO: 6122 - protein, 118 aa, Artificial Sequence
  Description of Artificial Sequence: Synthetic polypeptide
QIQLQESGPGLVKPSQSLSLTCSVTGFSINTGGYHWNWIRQFPGKKLEWMGYIYSSGTTRYNPSLKSRISITRDTSKNQFFLQLNSVTPEDTATYYCTRGNWHYFDYWGQGTLVAVSS

SEQ ID NO: 6123 - protein, 118 aa, Artificial Sequence
  Description of Artificial Sequence: Synthetic polypeptide
QIQLQESGPGLVKPSETLSLTCTVSGFSINTGGYHWNWIRQPAGKGLEWIGYIYSSGSTSYNPSLKSRVTMSRDTSKNQFSLKLSSVTAADTAVYYCARGNWHYFDFWGQGTMVTVSS

SEQ ID NO: 6124 - protein, 118 aa, Artificial Sequence
  Description of Artificial Sequence: Synthetic polypeptide
QIQLQESGPGLVKPSQTLSLTCTVSGFSINTGGYHWNWIRQHPGKGLEWIGYIYSSGSTSYNPSLKSLVTISRDTSKNQFSLKLSSVTAADTAVYYCARGNWHYFDFWGQGTMVTVSS

SEQ ID NO: 6125 - protein, 118 aa, Artificial Sequence
  Description of Artificial Sequence: Synthetic polypeptide
EIQLLESGGGLVQPGGSLRLSCAVSGFSINTGGYHWNWVRQAPGKGLEWVGYIYSSGSTSYNPSLKSRFTISRDTSKNTFYLQMNSLRAEDTAVYYCARGNWHYFDFWGQGTMVTVSS

SEQ ID NO: 6126 - protein, 118 aa, Artificial Sequence
  Description of Artificial Sequence: Synthetic polypeptide
QIQLVQSGAEVKKPGSSVKVSCKVSGFSINTGGYHWNWVRQAPGQGLEWMGYIYSSGSTSYNPSLKSRVTITRDTSTNTFYMELSSLRSEDTAVYYCARGNWHYFDFWGQGTMVTVSS

SEQ ID NO: 6127 - protein, 118 aa, Artificial Sequence
  Description of Artificial Sequence: Synthetic polypeptide
EIQLVESGGGLVQPGGSLRLSCAVSGFSINTGGYHWNWVRQAPGKGLEWVGYIYSSGSTSYNPSLKSRFTISRDTAKNSFYLQMNSLRAEDTAVYYCARGNWHYFDFWGQGTMVTVSS

SEQ ID NO: 6128 - protein, 118 aa, Artificial Sequence
  Description of Artificial Sequence: Synthetic polypeptide
QIQLVQSGAEVKKPGASVKVSCKVSGFSINTGGYHWNWVRQAPGQGLEWMGYIYSSGSTSYNPSLKSRVTMTRDTSTNTFYMELSSLRSEDTAVYYCARGNWHYFDFWGQGTMVTVSS

SEQ ID NO: 6129 - protein, 118 aa, Artificial Sequence
  Description of Artificial Sequence: Synthetic polypeptide
QIQLQESGPGLVKPSQTLSLTCTVSGFSINTGGYHWNWIRQHPGKGLEWIGYIYSSGTTRYNPSLKSLVTISRDTSKNQFSLKLSSVTAADTAVYYCARGNWHYFDYWGQGTLVTVSS

SEQ ID NO: 6130 - protein, 118 aa, Artificial Sequence
  Description of Artificial Sequence: Synthetic polypeptide
QIQLQESGPGLVKPSETLSLTCTVSGFSINTGGYHWNWIRQPAGKGLEWIGYIYSSGTTRYNPSLKSRVTMSRDTSKNQFSLKLSSVTAADTAVYYCARGNWHYFDYWGQGTLVTVSS

SEQ ID NO: 6131 - protein, 118 aa, Artificial Sequence
  Description of Artificial Sequence: Synthetic polypeptide
EIQLLESGGGLVQPGGSLRLSCAVSGFSINTGGYHWNWVRQAPGKGLEWVGYIYSSGTTRYNPSLKSRFTISRDTSKNTFYLQMNSLRAEDTAVYYCARGNWHYFDYWGQGTLVTVSS

SEQ ID NO: 6132 - protein, 118 aa, Artificial Sequence
  Description of Artificial Sequence: Synthetic polypeptide
QIQLVESGGGLVKPGGSLRLSCAVSGFSINTGGYHWNWIRQAPGKGLEWVGYIYSSGTTRYNPSLKSRFTISRDTAKNSFYLQMNSLRAEDTAVYYCARGNWHYFDYWGQGTLVTVSS

SEQ ID NO: 6133 - protein, 118 aa, Artificial Sequence
  Description of Artificial Sequence: Synthetic polypeptide
QIQLVQSGAEVKKPGASVKVSCKVSGFSINTGGYHWNWVRQAPGQGLEWMGYIYSSGTTRYNPSLKSRVTMTRDTSTNTFYMELSSLRSEDTAVYYCARGNWHYFDYWGQGTLVTVSS

SEQ ID NO: 6134 - protein, 118 aa, Artificial Sequence
  Description of Artificial Sequence: Synthetic polypeptide
EIQLVQSGAEVKKPGATVKISCKVSGFSINTGGYHWNWVQQAPGKGLEWMGYIYSSGTTRYNPSLKSRVTITRDTSTNTFYMELSSLRSEDTAVYYCARGNWHYFDYWGQGTLVTVSS

SEQ ID NO: 6135 - protein, 97 aa, Artificial Sequence
  Description of Artificial Sequence: Synthetic polypeptide
SYTLTQPPLLSVALGHKATITCSGERLSDKYVHWYQQKPGRAPVMVIYENDKRPSGIPDQFSGSNSGNIATLTISKAQAGYEADYYCFGSGTQLTVL

SEQ ID NO: 6136 - protein, 107 aa, Artificial Sequence
  Description of Artificial Sequence: Synthetic polypeptide
SYTLTQPPSLSVAPGQKATIICSGENLSDKYVHWYQQKPGRAPVMVIYENEKRPSGIPDQFSGSNSGNIATLTISKAQPGSEADYYCHYWESINSVVFGSGTHLTVL

SEQ ID NO: 6137 - protein, 107 aa, Artificial Sequence
  Description of Artificial Sequence: Synthetic polypeptide
QSVTTQPPSVSGAPGQRVTISCSGERLSDKYVHWYQQLPGTAPKMLIYENDKRPSGVPDRFSGSNSGNSASLAITGLQAEDEADYYCQSWDSTNSAVFGGGTQLTVL

SEQ ID NO: 6138 - protein, 107 aa, Artificial Sequence
  Description of Artificial Sequence: Synthetic polypeptide
QSVTTQPPSASGTPGQRVTISCSGERLSDKYVHWYQQLPGTAPKMLIYENDKRPSGVPDRFSGSNSGNSASLAISGLQSEDEADYYCQSWDSTNSAVFGGGTQLTVL

SEQ ID NO: 6139 - protein, 107 aa, Artificial Sequence
  Description of Artificial Sequence: Synthetic polypeptide
QSVTTQPPSASGTPGQRVTISCSGERLSDKYVHWYQQLPGTAPKMLIYENDKRPSGVPDRFSGSNSGNSASLAISGLRSEDEADYYCQSWDSTNSAVFGGGTQLTVL

SEQ ID NO: 6140 - protein, 107 aa, Artificial Sequence
  Description of Artificial Sequence: Synthetic polypeptide
SSETTQPHSVSVATAQMARITCSGERLSDKYVHWYQQKPGQDPVMVIYENDKRPSGIPERFSGSNPGNTATLTISRIEAGDEADYYCQSWDSTNSAVFGGGTQLTVL

SEQ ID NO: 6141 - protein, 108 aa, Artificial Sequence
  Description of Artificial Sequence: Synthetic polypeptide
DIQMTQSPSTLSASVGDRVTITCSGERLSDKYVHWYQQKPGKAPKMLIYENDKRPSGVPSRFSGSNSGNEATLTISSLQPDDFATYYCQSWDSTNSAVFGQGTKVEIK

SEQ ID NO: 6142 - protein, 107 aa, Artificial Sequence
  Description of Artificial Sequence: Synthetic polypeptide
QYVLTQPPSASGTPGQRVTISCSGENLSDKYVHWYQQLPGTAPKMLIYENEKRPSGVPDRFSGSNSGNSASLAISGLQSEDEADYYCHYWESINSVVFGEGTELTVL

SEQ ID NO: 6143 - protein, 107 aa, Artificial Sequence
  Description of Artificial Sequence: Synthetic polypeptide
QYVLTQPPSASGTPGQRVTISCSGENLSDKYVHWYQQLPGTAPKMLIYENEKRPSGVPDRFSGSNSGNSASLAISGLRSEDEADYYCHYWESINSVVFGEGTELTVL

SEQ ID NO: 6144 - protein, 107 aa, Artificial Sequence
  Description of Artificial Sequence: Synthetic polypeptide
SYELTQPPSVSVSPGQTASITCSGENLSDKYVHWYQQKPGQSPVMVIYENEKRPSGIPERFSGSNSGNTATLTISGTQAMDEADYYCHYWESINSVVFGEGTELTVL

SEQ ID NO: 6145 - protein, 108 aa, Artificial Sequence
  Description of Artificial Sequence: Synthetic polypeptide
DYVLTQSPLSLPVTPGEPASISCSGENLSDKYVHWYLQKPGQSPQMLIYENEKRPSGVPDRFSGSNSGNDATLKISRVEAEDVGVYYCHYWESINSVVFGQGTKVEIK

SEQ ID NO: 6146 - protein, 108 aa, Artificial Sequence
  Description of Artificial Sequence: Synthetic polypeptide
AYQLTQSPSSLSASVGDRVTITCSGENLSDKYVHWYQQKPGKAPKMLIYENEKRPSGVPSRFSGSNSGNDATLTISSLQPEDFATYYCHYWESINSVVFGQGTKVEIK

SEQ ID NO: 6147 - protein, 108 aa, Artificial Sequence
  Description of Artificial Sequence: Synthetic polypeptide
EYVLTQSPATLSVSPGERATLSCSGENLSDKYVHWYQQKPGQAPRMLIYENEKRPSGIPARFSGSNSGNEATLTISSLQSEDFAVYYCHYWESINSVVFGQGTKVEIK

SEQ ID NO: 6148 - protein, 448 aa, Artificial Sequence
  Description of Artificial Sequence: Synthetic polypeptide
QIQLQESGPGLVKPSQSLSLTCSVTGFSINTGGYHWNWIRQFPGKKLEWMGYIYSSGSTSYNPSLKSRISITRDTSKNQFFLQLNSVTTEDTATYYCARGNWHYFDFWGQGTMVTVSSASTKGPSVFPLAPSSKSTSGGTAALGCLVKDYFPEPVTVSWNSGALTSGVHTFPAVLQSSGLYSLSSVVTVPSSSLGTQTYICNVNHKPSNTKVDKRVEPKSCDKTHTCPPCPAPELLGGPSVFLFPPKPKDTLMISRTPEVTCVVVDVSHEDPEVKFNWYVDGVEVHNAKTKPREEQYASTYRVVSVLTVLHQDWLNGKEYKCKVSNKALPAPIEKTISKAKGQPREPQVCTLPPSREEMTKNQVSLSCAVKGFYPSDIAVEWESNGQPENNYKTTPPVLDSDGSFFLVSKLTVDKSRWQQGNVFSCSVMHEALHNHYTQKSLSLSPGK

SEQ ID NO: 6149 - protein, 448 aa, Artificial Sequence
  Description of Artificial Sequence: Synthetic polypeptide
QIQLQESGPGLVKPSQSLSLTCSVTGFSINTGGYHWNWIRQFPGKKLEWMGYIYSSGSTSYNPSLKSRISITRDTSKNQFFLQLNSVTTEDTATYYCARGNWHYFDFWGQGTMVTVSSASTKGPSVFPLAPSSKSTSGGTAALGCLVKDYFPEPVTVSWNSGALTSGVHTFPAVLQSSGLYSLSSVVTVPSSSLGTQTYICNVNHKPSNTKVDKRVEPKSCDKTHTCPPCPAPELLGGPSVFLFPPKPKDTLMISRTPEVTCVVVDVSHEDPEVKFNWYVDGVEVHNAKTKPREEQYNSTYRVVSVLTVLHQDWLNGKEYKCKVSNKALPAPIEKTISKAKGQPREPQVCTLPPSREEMTKNQVSLSCAVKGFYPSDIAVEWESNGQPENNYKTTPPVLDSDGSFFLVSKLTVDKSRWQQGNVFSCSVMHEALHNHYTQKSLSLSPGK

SEQ ID NO: 6150 - protein, 213 aa, Artificial Sequence
  Description of Artificial Sequence: Synthetic polypeptide
SYTLTQPPLLSVALGHKATITCSGERLSDKYVHWYQQKPGRAPVMVIYENDKRPSGIPDQFSGSNSGNIATLTISKAQAGYEADYYCQSWDSTNSAVFGSGTQLTVLGQPKANPTVTLFPPSSEELQANKATLVCLISDFYPGAVTVAWKADGSPVKAGVETTKPSKQSNNKYAASSYLSLTPEQWKSHRSYSCQVTHEGSTVEKTVAPTECS

SEQ ID NO: 6151 - protein, 448 aa, Artificial Sequence
  Description of Artificial Sequence: Synthetic polypeptide
QIQLQESGPGLVKPSQSLSLTCSVTGFSINTGGYHWNWIRQFPGKKLEWMGYIYSSGTTRYNPSLKSRISITRDTSKNQFFLQLNSVTPEDTATYYCTRGNWHYFDYWGQGTLVAVSSASTKGPSVFPLAPSSKSTSGGTAALGCLVKDYFPEPVTVSWNSGALTSGVHTFPAVLQSSGLYSLSSVVTVPSSSLGTQTYICNVNHKPSNTKVDKRVEPKSCDKTHTCPPCPAPELLGGPSVFLFPPKPKDTLMISRTPEVTCVVVDVSHEDPEVKFNWYVDGVEVHNAKTKPREEQYASTYRVVSVLTVLHQDWLNGKEYKCKVSNKALPAPIEKTISKAKGQPREPQVCTLPPSREEMTKNQVSLSCAVKGFYPSDIAVEWESNGQPENNYKTTPPVLDSDGSFFLVSKLTVDKSRWQQGNVFSCSVMHEALHNHYTQKSLSLSPGK

SEQ ID NO: 6152 - protein, 448 aa, Artificial Sequence
  Description of Artificial Sequence: Synthetic polypeptide
QIQLQESGPGLVKPSQSLSLTCSVTGFSINTGGYHWNWIRQFPGKKLEWMGYIYSSGTTRYNPSLKSRISITRDTSKNQFFLQLNSVTPEDTATYYCTRGNWHYFDYWGQGTLVAVSSASTKGPSVFPLAPSSKSTSGGTAALGCLVKDYFPEPVTVSWNSGALTSGVHTFPAVLQSSGLYSLSSVVTVPSSSLGTQTYICNVNHKPSNTKVDKRVEPKSCDKTHTCPPCPAPELLGGPSVFLFPPKPKDTLMISRTPEVTCVVVDVSHEDPEVKFNWYVDGVEVHNAKTKPREEQYNSTYRVVSVLTVLHQDWLNGKEYKCKVSNKALPAPIEKTISKAKGQPREPQVCTLPPSREEMTKNQVSLSCAVKGFYPSDIAVEWESNGQPENNYKTTPPVLDSDGSFFLVSKLTVDKSRWQQGNVFSCSVMHEALHNHYTQKSLSLSPGK

SEQ ID NO: 6153 - protein, 213 aa, Artificial Sequence
  Description of Artificial Sequence: Synthetic polypeptide
SYTLTQPPSLSVAPGQKATIICSGENLSDKYVHWYQQKPGRAPVMVIYENEKRPSGIPDQFSGSNSGNIATLTISKAQPGSEADYYCHYWESINSVVFGSGTHLTVLGQPKANPTVTLFPPSSEELQANKATLVCLISDFYPGAVTVAWKADGSPVKAGVETTKPSKQSNNKYAASSYLSLTPEQWKSHRSYSCQVTHEGSTVEKTVAPTECS

SEQ ID NO: 6154-6174 - skipped (21 entries)

SEQ ID NO: 6175 - protein, 243 aa, Artificial Sequence
  Description of Artificial Sequence: Synthetic polypeptide
QVHLQESGPGLVKPSETLSLTCTVSDDSISSYYWSWIRQPPGKGLEWIGHISYSGSANYNPSLKSRVTISVDTSKNQFSLKLSSVTAADTAVYYCANWDDAFNIWGQGTMVTVSSGGGGSGGGGSGGGGSGGGGSEIVLTQSPGTLSLSPGERATLSCRASQSVSSSYLAWYQQKPGQAPRLLIYGASSRATGIPDRFSGSGSGTDFTLTISRLEPEDFAVYYCQQYGSSPWTFGQGTKVEIK

SEQ ID NO: 6176 - protein, 115 aa, Artificial Sequence
  Description of Artificial Sequence: Synthetic polypeptide
QVHLQESGPGLVKPSETLSLTCTVSDDSISSYYWSWIRQPPGKGLEWIGHISYSGSANYNPSLKSRVTISVDTSKNQFSLKLSSVTAADTAVYYCANWDDAFNIWGQGTMVTVSS

SEQ ID NO: 6177 - protein, 108 aa, Artificial Sequence
  Description of Artificial Sequence: Synthetic polypeptide
EIVLTQSPGTLSLSPGERATLSCRASQSVSSSYLAWYQQKPGQAPRLLIYGASSRATGIPDRFSGSGSGTDFTLTISRLEPEDFAVYYCQQYGSSPWTFGQGTKVEIK

SEQ ID NO: 6178 - protein, 250 aa, Artificial Sequence
  Description of Artificial Sequence: Synthetic polypeptide
EVQLVQSGAEVKEPGESLKISCKNSGYSFTNYWVGWVRQMPGKGLEWMGIIYPGDSDTRYSPSFQGQVTISADKSINTAYLQWSSLKASDTAMYYCGRLTMFRGIIIGYFDYWGQGTLVTVSSGGGGSGGGGSGGGGSGGGGSEIVLTQSPATLSLSPGERATLSCRASQSVSSYLAWYQQKPGQAPRLLIYDASNRATGIPARFSGSGSGTDFTLTISSLEPEDFAVYYCQQRSNWPWTFGQGTKVEIK

SEQ ID NO: 6179 - protein, 123 aa, Artificial Sequence
  Description of Artificial Sequence: Synthetic polypeptide
EVQLVQSGAEVKEPGESLKISCKNSGYSFTNYWVGWVRQMPGKGLEWMGIIYPGDSDTRYSPSFQGQVTISADKSINTAYLQWSSLKASDTAMYYCGRLTMFRGIIIGYFDYWGQGTLVTVSS

SEQ ID NO: 6180 - protein, 107 aa, Artificial Sequence
  Description of Artificial Sequence: Synthetic polypeptide
EIVLTQSPATLSLSPGERATLSCRASQSVSSYLAWYQQKPGQAPRLLIYDASNRATGIPARFSGSGSGTDFTLTISSLEPEDFAVYYCQQRSNWPWTFGQGTKVEIK

SEQ ID NO: 6181 - protein, 247 aa, Artificial Sequence
  Description of Artificial Sequence: Synthetic polypeptide
QVQLQQSGPELVKPGASVKMSCKASGYTFTDYVINWGKQRSGQGLEWIGEIYPGSGTNYYNEKFKAKATLTADKSSNIAYMQLSSLTSEDSAVYFCARRGRYGLYAMDYWGQGTSVTVSSGGGGSGGGGSGGGGSGGGGSDIQMTQTTSSLSASLGDRVTISCRASQDISNYLNWYQQKPDGTVKLLIYYTSRLHSGVPSRFSGSGSGTDYSLTINNLEQEDIATYFCQQGNTRPWTFGGGTKLEIK

SEQ ID NO: 6182 - protein, 120 aa, Artificial Sequence
  Description of Artificial Sequence: Synthetic polypeptide
QVQLQQSGPELVKPGASVKMSCKASGYTFTDYVINWGKQRSGQGLEWIGEIYPGSGTNYYNEKFKAKATLTADKSSNIAYMQLSSLTSEDSAVYFCARRGRYGLYAMDYWGQGTSVTVSS

SEQ ID NO: 6183 - protein, 107 aa, Artificial Sequence
  Description of Artificial Sequence: Synthetic polypeptide
DIQMTQTTSSLSASLGDRVTISCRASQDISNYLNWYQQKPDGTVKLLIYYTSRLHSGVPSRFSGSGSGTDYSLTINNLEQEDIATYFCQQGNTRPWTFGGGTKLEIK

SEQ ID NO: 6184 - protein, 239 aa, Artificial Sequence
  Description of Artificial Sequence: Synthetic polypeptide
EVQLVESGGGVVRPGGSLRLSCAASGFTFDDYGMSWVRQAPGKGLEWVSGINWNGGSTGYADSVKGRFTISRDNAKNSLYLQMNSLRAEDTAVYYCARGRSLLFDYWGQGTLVTVSRGGGGSGGGGSGGGGSSELTQDPAVSVALGQTVRITCQGDSLRSYYASWYQQKPGQAPVLVIYGKNNRPSGIPDRFSGSSSGNTASLTITGAQAEDEADYYCNSRDSSGNHVVFGGGTKLTVL

SEQ ID NO: 6185 - protein, 117 aa, Artificial Sequence
  Description of Artificial Sequence: Synthetic polypeptide
EVQLVESGGGVVRPGGSLRLSCAASGFTFDDYGMSWVRQAPGKGLEWVSGINWNGGSTGYADSVKGRFTISRDNAKNSLYLQMNSLRAEDTAVYYCARGRSLLFDYWGQGTLVTVSR

SEQ ID NO: 6186 - protein, 108 aa, Artificial Sequence
  Description of Artificial Sequence: Synthetic polypeptide
SSELTQDPAVSVALGQTVRITCQGDSLRSYYASWYQQKPGQAPVLVIYGKNNRPSGIPDRFSGSSSGNTASLTITGAQAEDEADYYCNSRDSSGNHVVFGGGTKLTVL

SEQ ID NO: 6187 - protein, 245 aa, Artificial Sequence
  Description of Artificial Sequence: Synthetic polypeptide
QIQLQESGPGLVKPSQSLSLTCSVTGFSINTGGYHWNWIRQFPGKKLEWMGYIYSSGSTSYNPSLKSRISITRDTSKNQFFLQLNSVTTEDTATYYCARGNWHYFDFWGQGTMVTVSSGGGGSGGGGSGGGGSGGGGSSYTLTQPPLLSVALGHKATITCSGERLSDKYVHWYQQKPGRAPVMVIYENDKRPSGIPDQFSGSNSGNIATLTISKAQAGYEADYYCQSWDSTNSAVFGSGTQLTVL

SEQ ID NO: 6188 - protein, 245 aa, Artificial Sequence
  Description of Artificial Sequence: Synthetic polypeptide
SYTLTQPPLLSVALGHKATITCSGERLSDKYVHWYQQKPGRAPVMVIYENDKRPSGIPDQFSGSNSGNIATLTISKAQAGYEADYYCQSWDSTNSAVFGSGTQLTVLGGGGSGGGGSGGGGSGGGGSQIQLQESGPGLVKPSQSLSLTCSVTGFSINTGGYHWNWIRQFPGKKLEWMGYIYSSGSTSYNPSLKSRISITRDTSKNQFFLQLNSVTTEDTATYYCARGNWHYFDFWGQGTMVTVSS

SEQ ID NO: 6189 - protein, 245 aa, Artificial Sequence
  Description of Artificial Sequence: Synthetic polypeptide
QIQLQESGPGLVKPSQSLSLTCSVTGFSINTGGYHWNWIRQFPGKKLEWMGYIYSSGTTRYNPSLKSRISITRDTSKNQFFLQLNSVTPEDTATYYCTRGNWHYFDYWGQGTLVAVSSGGGGSGGGGSGGGGSGGGGSSYTLTQPPSLSVAPGQKATIICSGENLSDKYVHWYQQKPGRAPVMVIYENEKRPSGIPDQFSGSNSGNIATLTISKAQPGSEADYYCHYWESINSVVFGSGTHLTVL

SEQ ID NO: 6190 - protein, 245 aa, Artificial Sequence
  Description of Artificial Sequence: Synthetic polypeptide
SYTLTQPPSLSVAPGQKATIICSGENLSDKYVHWYQQKPGRAPVMVIYENEKRPSGIPDQFSGSNSGNIATLTISKAQPGSEADYYCHYWESINSVVFGSGTHLTVLGGGGSGGGGSGGGGSGGGGSQIQLQESGPGLVKPSQSLSLTCSVTGFSINTGGYHWNWIRQFPGKKLEWMGYIYSSGTTRYNPSLKSRISITRDTSKNQFFLQLNSVTPEDTATYYCTRGNWHYFDYWGQGTLVAVSS

SEQ ID NO: 6191-7291 - skipped (1101 entries)

SEQ ID NO: 7292 - protein, 32 aa, Artificial Sequence
  Description of Artificial Sequence: Synthetic polypeptide
GIPDQFSGSNSGNIATLTISKAQAGYEADYYC

SEQ ID NO: 7293-7294 - skipped (2 entries)

SEQ ID NO: 7295 - protein, 118 aa, Artificial Sequence
  Description of Artificial Sequence: Synthetic polypeptide
QIQLQESGPGLVKPSQSLSLSCSVTGFSINTGGYHWNWIRQFPGKKVEWMGYIYSSGTTKYNPSLKSRISITRDTSKNQFFLQLNSVTTEDTATYYCARGDWHYFDYWGQGTMVAVSS

SEQ ID NO: 7296 - protein, 107 aa, Artificial Sequence
  Description of Artificial Sequence: Synthetic polypeptide
SYTLTQPPLVSVALGQKATIICSGENLSDKYVHWYQQKPGRAPVMVIYENDKRPSGIPDQFSGSNSGNIATLTISKAQAGYEADYYCHCWDSTNSAVFGSGTHLTVL

SEQ ID NO: 7297 - protein, 118 aa, Artificial Sequence
  Description of Artificial Sequence: Synthetic polypeptide
QIQLQESGPGLVKPSQSLSLTCSVTGFSINTGGYHWNWIRQFPGKKLEWMGYIYSSGSTRYNPSLKSRFSITRDTSKNQFFLQLNSVTTEDTATYYCTRGNWHYFDYWGQGTLVAVSS

SEQ ID NO: 7298 - protein, 118 aa, Artificial Sequence
  Description of Artificial Sequence: Synthetic polypeptide
QIQLQESGPGLVKPSQSLSLSCSVTGFSITTTGYHWNWIRQFPGKKLEWMGYIYSSGSTSYNPSLKSRFSITRDTSKNQFFLQLNSVTTEDTATYYCARGDWHYFDYWGPGTMVTVSS

SEQ ID NO: 7299 - protein, 107 aa, Artificial Sequence
  Description of Artificial Sequence: Synthetic polypeptide
SFTLTQPPLVSVAVGQVATITCSGEKLSDKYVHWYQQKPGRAPVMVIYENDRRPSGIPDQFSGSNSGNIASLTISKAQAGDEADYFCQFWDSTNSAVFGGGTQLTVL

SEQ ID NO: 7300 - protein, 118 aa, Artificial Sequence
  Description of Artificial Sequence: Synthetic polypeptide
QIQLQESGPGLVKPSQTLSLTCTVSGFSITTTGYHWNWIRQHPGKGLEWIGYIYSSGSTSYNPSLKSLVTISRDTSKNQFSLKLSSVTAADTAVYYCARGDWHYFDYWGQGTMVTVSS

SEQ ID NO: 7301 - protein, 118 aa, Artificial Sequence
  Description of Artificial Sequence: Synthetic polypeptide
QIQLVESGGGLVKPGGSLRLSCAVSGFSITTTGYHWNWIRQAPGKGLEWVGYIYSSGSTSYNPSLKSRFTISRDTAKNSFYLQMNSLRAEDTAVYYCARGDWHYFDYWGQGTMVTVSS

SEQ ID NO: 7302 - protein, 118 aa, Artificial Sequence
  Description of Artificial Sequence: Synthetic polypeptide
EIQLLESGGGLVQPGGSLRLSCAVSGFSITTTGYHWNWVRQAPGKGLEWVGYIYSSGSTSYNPSLKSRFTISRDTSKNTFYLQMNSLRAEDTAVYYCARGDWHYFDYWGQGTMVTVSS

SEQ ID NO: 7303 - protein, 118 aa, Artificial Sequence
  Description of Artificial Sequence: Synthetic polypeptide
EIQLVESGGGLVQPGGSLRLSCAVSGFSITTTGYHWNWVRQAPGKGLEWVGYIYSSGSTSYNPSLKSRFTISRDTAKNSFYLQMNSLRAEDTAVYYCARGDWHYFDYWGQGTMVTVSS

SEQ ID NO: 7304 - protein, 118 aa, Artificial Sequence
  Description of Artificial Sequence: Synthetic polypeptide
QIQLVQSGAEVKKPGASVKVSCKVSGFSITTTGYHWNWVRQAPGQGLEWMGYIYSSGSTSYNPSLKSRVTMTRDTSTNTFYMELSSLRSEDTAVYYCARGDWHYFDYWGQGTMVTVSS

SEQ ID NO: 7305 - protein, 107 aa, Artificial Sequence
  Description of Artificial Sequence: Synthetic polypeptide
SSETTQPPSVSVSPGQTASITCSGEKLSDKYVHWYQQKPGQSPVMVIYENDRRPSGIPERFSGSNSGNTATLTISGTQAMDEADYFCQFWDSTNSAVFGGGTQLTVL

SEQ ID NO: 7306 - protein, 107 aa, Artificial Sequence
  Description of Artificial Sequence: Synthetic polypeptide
SSETTQPHSVSVATAQMARITCSGEKLSDKYVHWYQQKPGQDPVMVIYENDRRPSGIPERFSGSNPGNTATLTISRIEAGDEADYFCQFWDSTNSAVFGGGTQLTVL

SEQ ID NO: 7307 - protein, 107 aa, Artificial Sequence
  Description of Artificial Sequence: Synthetic polypeptide
QSVTTQPPSASGTPGQRVTISCSGEKLSDKYVHWYQQLPGTAPKMLIYENDRRPSGVPDRFSGSNSGNSASLAISGLRSEDEADYFCQFWDSTNSAVFGGGTQLTVL

SEQ ID NO: 7308 - protein, 107 aa, Artificial Sequence
  Description of Artificial Sequence: Synthetic polypeptide
QSVTTQPPSVSGAPGQRVTISCSGEKLSDKYVHWYQQLPGTAPKMLIYENDRRPSGVPDRFSGSNSGNSASLAITGLQAEDEADYFCQFWDSTNSAVFGGGTQLTVL

SEQ ID NO: 7309 - protein, 108 aa, Artificial Sequence
  Description of Artificial Sequence: Synthetic polypeptide
DSVTTQSPLSLPVTLGQPASISCSGEKLSDKYVHWYQQRPGQSPRMLIYENDRRPSGVPDRFSGSNSGNDATLKISRVEAEDVGVYFCQFWDSTNSAVFGGGTKVEIK

SEQ ID NO: 7310 - protein, 245 aa, Artificial Sequence
  Description of Artificial Sequence: Synthetic polypeptide
EIQLLESGGGLVQPGGSLRLSCAVSGFSITTTGYHWNWVRQAPGKGLEWVGYIYSSGSTSYNPSLKSRFTISRDTSKNTFYLQMNSLRAEDTAVYYCARGDWHYFDYWGQGTMVTVSSGGGGSGGGGSGGGGSGGGGSSSETTQPPSVSVSPGQTASITCSGEKLSDKYVHWYQQKPGQSPVMVIYENDRRPSGIPERFSGSNSGNTATLTISGTQAMDEADYFCQFWDSTNSAVFGGGTQLTVL

SEQ ID NO: 7311 - protein, 246 aa, Artificial Sequence
  Description of Artificial Sequence: Synthetic polypeptide
EIQLLESGGGLVQPGGSLRLSCAVSGFSITTTGYHWNWVRQAPGKGLEWVGYIYSSGSTSYNPSLKSRFTISRDTSKNTFYLQMNSLRAEDTAVYYCARGDWHYFDYWGQGTMVTVSSGGGGSGGGGSGGGGSGGGGSDSVTTQSPLSLPVTLGQPASISCSGEKLSDKYVHWYQQRPGQSPRMLIYENDRRPSGVPDRFSGSNSGNDATLKISRVEAEDVGVYFCQFWDSTNSAVFGGGTKVEIK

SEQ ID NO: 7312 - protein, 32 aa, Artificial Sequence
  Description of Artificial Sequence: Synthetic polypeptide
QIQLQESGPGLVKPSQSLSLSCSVTGFSINTG

SEQ ID NO: 7313 - protein, 5 aa, Artificial Sequence
  Description of Artificial Sequence: Synthetic peptide
GYHWN

SEQ ID NO: 7314 - protein, 14 aa, Artificial Sequence
  Description of Artificial Sequence: Synthetic peptide
WIRQFPGKKVEWMG

SEQ ID NO: 7315 - protein, 8 aa, Artificial Sequence
  Description of Artificial Sequence: Synthetic peptide
GDWHYFDY

SEQ ID NO: 7316 - protein, 11 aa, Artificial Sequence
  Description of Artificial Sequence: Synthetic peptide
WGQGTMVAVSS

SEQ ID NO: 7317 - protein, 32 aa, Artificial Sequence
  Description of Artificial Sequence: Synthetic polypeptide
QIQLQESGPGLVKPSQSLSLTCSVTGFSINTG

SEQ ID NO: 7318 - protein, 16 aa, Artificial Sequence
  Description of Artificial Sequence: Synthetic peptide
YIYSSGSTRYNPSLKS

SEQ ID NO: 7319 - protein, 32 aa, Artificial Sequence
  Description of Artificial Sequence: Synthetic polypeptide
RFSITRDTSKNQFFLQLNSVTTEDTATYYCTR

SEQ ID NO: 7320 - protein, 22 aa, Artificial Sequence
  Description of Artificial Sequence: Synthetic peptide
SYTLTQPPLVSVALGQKATIIC

SEQ ID NO: 7321 - protein, 10 aa, Artificial Sequence
  Description of Artificial Sequence: Synthetic peptide
HCWDSTNSAV

SEQ ID NO: 7322 - protein, 32 aa, Artificial Sequence
  Description of Artificial Sequence: Synthetic polypeptide
QIQLQESGPGLVKPSQSLSLSCSVTGFSITTT

SEQ ID NO: 7323 - protein, 32 aa, Artificial Sequence
  Description of Artificial Sequence: Synthetic polypeptide
RFSITRDTSKNQFFLQLNSVTTEDTATYYCAR

SEQ ID NO: 7324 - protein, 11 aa, Artificial Sequence
  Description of Artificial Sequence: Synthetic peptide
WGPGTMVTVSS

SEQ ID NO: 7325 - protein, 22 aa, Artificial Sequence
  Description of Artificial Sequence: Synthetic peptide
SFTLTQPPLVSVAVGQVATITC

SEQ ID NO: 7326 - protein, 11 aa, Artificial Sequence
  Description of Artificial Sequence: Synthetic peptide
SGEKLSDKYVH

SEQ ID NO: 7327 - protein, 7 aa, Artificial Sequence
  Description of Artificial Sequence: Synthetic peptide
ENDRRPS

SEQ ID NO: 7328 - protein, 32 aa, Artificial Sequence
  Description of Artificial Sequence: Synthetic polypeptide
GIPDQFSGSNSGNIASLTISKAQAGDEADYFC

SEQ ID NO: 7329 - protein, 10 aa, Artificial Sequence
  Description of Artificial Sequence: Synthetic peptide
QFWDSTNSAV

SEQ ID NO: 7330 - protein, 32 aa, Artificial Sequence
  Description of Artificial Sequence: Synthetic polypeptide
QIQLQESGPGLVKPSQTLSLTCTVSGFSITTT

SEQ ID NO: 7331 - protein, 32 aa, Artificial Sequence
  Description of Artificial Sequence: Synthetic polypeptide
QIQLVESGGGLVKPGGSLRLSCAVSGFSITTT

SEQ ID NO: 7332 - protein, 32 aa, Artificial Sequence
  Description of Artificial Sequence: Synthetic polypeptide
EIQLLESGGGLVQPGGSLRLSCAVSGFSITTT

SEQ ID NO: 7333 - protein, 32 aa, Artificial Sequence
  Description of Artificial Sequence: Synthetic polypeptide
EIQLVESGGGLVQPGGSLRLSCAVSGFSITTT

SEQ ID NO: 7334 - protein, 32 aa, Artificial Sequence
  Description of Artificial Sequence: Synthetic polypeptide
QIQLVQSGAEVKKPGASVKVSCKVSGFSITTT

SEQ ID NO: 7335 - protein, 22 aa, Artificial Sequence
  Description of Artificial Sequence: Synthetic peptide
SSETTQPPSVSVSPGQTASITC

SEQ ID NO: 7336 - protein, 32 aa, Artificial Sequence
  Description of Artificial Sequence: Synthetic polypeptide
GIPERFSGSNSGNTATLTISGTQAMDEADYFC

SEQ ID NO: 7337 - protein, 32 aa, Artificial Sequence
  Description of Artificial Sequence: Synthetic polypeptide
GIPERFSGSNPGNTATLTISRIEAGDEADYFC

SEQ ID NO: 7338 - protein, 32 aa, Artificial Sequence
  Description of Artificial Sequence: Synthetic polypeptide
GVPDRFSGSNSGNSASLAISGLRSEDEADYFC

SEQ ID NO: 7339 - protein, 32 aa, Artificial Sequence
  Description of Artificial Sequence: Synthetic polypeptide
GVPDRFSGSNSGNSASLAITGLQAEDEADYFC

SEQ ID NO: 7340 - protein, 23 aa, Artificial Sequence
  Description of Artificial Sequence: Synthetic peptide
DSVTTQSPLSLPVTLGQPASISC

SEQ ID NO: 7341 - protein, 15 aa, Artificial Sequence
  Description of Artificial Sequence: Synthetic peptide
WYQQRPGQSPRMLIY

SEQ ID NO: 7342 - protein, 32 aa, Artificial Sequence
  Description of Artificial Sequence: Synthetic polypeptide
GVPDRFSGSNSGNDATLKISRVEAEDVGVYFC

SEQ ID NO: 7343-7370 - skipped (28 entries)

SEQ ID NO: 7371 - protein, 32 aa, Artificial Sequence
  Description of Artificial Sequence: Synthetic polypeptide
QIQLQESGPGLVKPSETLSLTCTVSGFSINTG

SEQ ID NO: 7372 - protein, 32 aa, Artificial Sequence
  Description of Artificial Sequence: Synthetic polypeptide
QIQLQESGPGLVKPSQTLSLTCTVSGFSINTG

SEQ ID NO: 7373 - protein, 32 aa, Artificial Sequence
  Description of Artificial Sequence: Synthetic polypeptide
EIQLLESGGGLVQPGGSLRLSCAVSGFSINTG

SEQ ID NO: 7374 - protein, 32 aa, Artificial Sequence
  Description of Artificial Sequence: Synthetic polypeptide
QIQLVQSGAEVKKPGSSVKVSCKVSGFSINTG

SEQ ID NO: 7375 - protein, 32 aa, Artificial Sequence
  Description of Artificial Sequence: Synthetic polypeptide
EIQLVESGGGLVQPGGSLRLSCAVSGFSINTG

SEQ ID NO: 7376 - protein, 32 aa, Artificial Sequence
  Description of Artificial Sequence: Synthetic polypeptide
QIQLVQSGAEVKKPGASVKVSCKVSGFSINTG

SEQ ID NO: 7377 - protein, 32 aa, Artificial Sequence
  Description of Artificial Sequence: Synthetic polypeptide
QIQLVESGGGLVKPGGSLRLSCAVSGFSINTG

SEQ ID NO: 7378 - protein, 32 aa, Artificial Sequence
  Description of Artificial Sequence: Synthetic polypeptide
EIQLVQSGAEVKKPGATVKISCKVSGFSINTG

SEQ ID NO: 7379-7384 - skipped (6 entries)

SEQ ID NO: 7385 - protein, 16 aa, Artificial Sequence
  Description of Artificial Sequence: Synthetic peptide
YIYSSGTTKYNPSLKS

What is claimed is:

1.-46. (canceled)

47. A multifunctional molecule comprising:
(a) an antigen binding domain that binds to CD33, and
(b) one or more immune cell engagers;
wherein the one or more immune cell engagers are selected from the group consisting of a T cell engager, an NK cell engager, a B cell engager, a dendritic cell engager, and a macrophage cell engager; and
wherein the antigen binding domain that binds to CD33 comprises:
(1) a heavy chain variable region (VH) comprising a heavy chain complementarity determining region 1 (HC CDR1), a heavy chain complementarity determining region 2 (HC CDR2) and a heavy chain complementarity determining region 3 (HC CDR3) sequences of a VH region having amino acids 252-367 of SEQ ID NO: 267; and
(2) a light chain variable region (VL) comprising a light chain complementarity determining region 1 (LC CDR1), a light chain complementarity determining region 2 (LC CDR2), and a light chain complementarity determining region 3 (LC CDR3) of SEQ ID NO: 268;
wherein the HC CDR1, the HC CDR2, the HC CDR3, the LC CDR1, the LC CDR2, and the LC CDR3 are determined by the Kabat numbering scheme, the Chothia numbering scheme, or a combination thereof.

48. The multifunctional molecule of claim 47, wherein the antigen binding domain that binds to CD33 comprises:
(1) a VH comprising a sequence having at least 80% sequence identity to the sequence of amino acids 252-367 of SEQ ID NO: 267;
(2) a VL comprising a sequence having at least 80% sequence identity to the sequence of SEQ ID NO: 268; or
(3) a combination thereof.

49. The multifunctional molecule of claim 47, wherein the antigen binding domain that binds to CD33 comprises:
(1) a VH comprising the sequence of amino acids 252-367 of SEQ ID NO: 267;
(2) a VL comprising the sequence of SEQ ID NO: 268; or
(3) a combination thereof.

50. The multifunctional molecule of claim 47, wherein the one or more immune cell engagers are the T cell engager, and the T cell engager binds to TCRVβ, CD3, TCRα, TCRβ, TCRγ, TCRζ, ICOS, CD28, CD27, HVEM, LIGHT, CD40, 4-1BB, OX40, DR3, GITR, CD30, TIM1, SLAM, CD2, or CD226.

51. The multifunctional molecule of claim 47, wherein the one or more immune cell engagers are the T cell engager, and the T cell engager is an anti-TCRVβ binding domain.

52. The multifunctional molecule of claim 51, wherein the anti-TCRVβ binding domain comprises an (i) scFv or (ii) an antibody or TCRVβ binding fragment thereof, wherein the anti-TCRVβ binding domain binds to TCRVβ, and the TCRVβ is a TCRβ V1 subfamily, a TCRβ V2 subfamily, a TCRβ V3 subfamily, a TCRβ V4 subfamily, a TCRβ V5 subfamily, a TCRβ V6 subfamily, a TCRβ V7 subfamily, a TCRβ V9 subfamily, a TCRβ V10 subfamily, a TCRβ V11 subfamily, a TCRβ V12 subfamily, a TCRβ V13 subfamily, a TCRβ V14 subfamily, a TCRβ V15 subfamily, a TCRβ V16 subfamily, a TCRβ V17 subfamily, a TCRβ V18 subfamily, a TCRβ V19 subfamily, a TCRβ V20 subfamily, a TCRβ V21 subfamily, a TCRβ V23 subfamily, a TCRβ V24 subfamily, a TCRβ V25 subfamily, a TCRβ V26 subfamily, a TCRβ V27 subfamily, a TCRβ V28 subfamily, a TCRβ V29 subfamily, or a TCRβ V30 subfamily.

53. The multifunctional molecule of claim 47, wherein the one or more immune cell engagers are the NK cell engager, and the NK cell engager binds to NKp30, NKp40, NKp44, NKp46, NKG2D, DNAM1, DAP10, CD16, optionally CD16a, CD16b, or both, CRTAM, CD27, PSGL1, CD96, CD100/SEMA4D, NKp80, CD244/SLAMF4/2B4, SLAMF6, SLAMF7, KIR2DS2, KIR2DS4, KIR3DS1, KIR2DS3, KIR2DS5, KIR2DS1, CD94, NKG2C, NKG2E, or CD160.

54. The multifunctional molecule of claim 47, wherein the one or more immune cell engagers are the NK cell engager, and the NK cell engager binds to NKp30.

55. The multifunctional molecule of claim 47, wherein the multifunctional molecule comprises:
(a) a first polypeptide comprising the one or more immune cell engagers linked to the VH of the antigen binding domain that binds to CD33, and a second polypeptide comprising the VL of the antigen binding domain that binds to CD33; or
(b) a first polypeptide comprising the VH of the antigen binding domain that binds to CD33 linked to the one or more immune cell engager, and a second polypeptide comprising the VL of the antigen binding domain that binds to CD33.

56. The multifunctional molecule of claim 47, wherein:
(i) the antigen binding domain that binds to CD33 is linked to the one or more immune cell engagers; or
(ii) the multifunctional molecule comprises a first polypeptide chain comprising a first heavy chain constant region and a second polypeptide chain comprising a second heavy chain constant region; and wherein:
(A) the antigen binding domain that binds to CD33 is linked to the first heavy chain constant region or the second heavy chain constant region;
(B) the one or more immune cell engagers are linked to the first heavy chain constant region, the second heavy chain constant region, or a combination thereof,
(C) the antigen binding domain that binds to CD33 is linked to the one or more immune cell engagers; or
(D) any combination thereof.

57. The multifunctional molecule of claim 56, wherein the first heavy chain constant region comprises a first Fc region and the second heavy chain constant region comprises a second Fc region.

58. The multifunctional molecule of claim 57, wherein:
(1) the first Fc region and the second Fc region comprise one or more of: a paired cavity-protuberance, an electrostatic interaction, or a strand-exchange;
(2) the first Fc region and the second Fc region comprise one or more amino acid substitutions at a position of 347, 349, 350, 351, 366, 368, 370, 392, 394, 395, 397, 398, 399, 405, 407, or 409; or
(3) the first Fc region comprises one or more amino acid substitutions selected from the group consisting of T366S, L368A, and Y407V, and the second Fc region comprises an amino acid substitution of T366W, or the first Fc region comprises an amino acid substitution of T366W, and the second Fc region comprises one or more amino acid substitutions selected from the group consisting of T366S, L368A, and Y407V.

59. The multifunctional molecule of claim 57, wherein the first Fc region and the second Fc region comprise an N297A mutation or a L234A/L235A mutation.

60. The multifunctional molecule of claim 47, wherein the antigen binding domain that binds to CD33 further comprises a light chain constant region.

61. The multifunctional molecule of claim 56, wherein the multifunctional molecule comprises a first polypeptide comprising the VH of the antigen binding domain that binds to CD33 linked to the first heavy chain constant region, a second polypeptide comprising the VL of the antigen binding domain that binds to CD33, and a third polypeptide comprising the one or more immune cell engagers linked to the second heavy chain constant region.

62. The multifunctional molecule of claim 47, wherein the multifunctional molecule comprises:
(1) a first polypeptide comprising a sequence having at least 80% sequence identity to the sequence of SEQ ID NO: 267, SEQ ID NO: 269, SEQ ID NO: 270, SEQ ID NO: 271, or SEQ ID NO: 272, and a second polypeptide comprising a sequence having at least 80% sequence identity to the sequence of SEQ ID NO: 268; or
(2) a first polypeptide, a second polypeptide, and a third polypeptide comprising sequences having at least 80% sequences identity to the sequences of SEQ ID NO: 274, SEQ ID NO: 268, SEQ ID NO: 275, respectively, or SEQ ID NO: 277, SEQ ID NO: 268, SEQ ID NO: 278, respectively.

63. The multifunctional molecule of claim 47, wherein the multifunctional molecule comprises:
(1) a first polypeptide comprising the sequence of SEQ ID NO: 267, SEQ ID NO: 269, SEQ ID NO: 270, SEQ ID NO: 271, or SEQ ID NO: 272, and a second polypeptide comprising the sequence of SEQ ID NO: 268; or
(2) a first polypeptide, a second polypeptide, and a third polypeptide comprising the sequences of SEQ ID NO: 274, SEQ ID NO: 268, SEQ ID NO: 275, respectively, or SEQ ID NO: 277, SEQ ID NO: 268, SEQ ID NO: 278, respectively.

64. The multifunctional molecule of claim 47, wherein the multifunctional molecule further comprises one or more cytokine molecules;
wherein the one or more cytokine molecules are interleukin-2 (TL-2) or functional fragment or variant thereof, interleukin-7 (TL-7) or functional fragment or variant thereof, interleukin-12 (IL-12) or functional fragment or variant thereof, interleukin-15 (IL-15) or functional fragment or variant thereof, interleukin-18 (IL-18) or functional fragment or variant thereof, interleukin-21 (IL-21) or functional fragment or variant thereof, or interferon gamma or functional fragment or variant thereof, or any combination thereof.

65. The multifunctional molecule of claim 64, wherein:
(i) the one or more cytokine molecules are linked to the antigen binding domain that binds to CD33, the one or more immune cell engagers, or any combination thereof; or
(ii) wherein the multifunctional molecule comprises the first polypeptide chain comprising the first heavy chain constant region and the second polypeptide chain comprising the second heavy chain constant region, and the one or more cytokine molecules are linked to the antigen binding domain that binds to CD33, the one or more immune cell engagers, the first heavy chain constant region, the second heavy chain constant region, or any combination thereof.

66. The multifunctional molecule of claim 64, wherein:
(a) the multifunctional molecule comprises a first polypeptide comprising the one or more immune cell engagers linked to the VH of the antigen binding domain that binds to CD33, and a second polypeptide comprising the VL of the antigen binding domain that binds to CD33 linked to the light chain constant region linked to the one or more cytokine molecules; or
(b) the multifunctional molecule comprises the first polypeptide chain comprising the first heavy chain constant region and the second polypeptide chain comprising the second heavy chain constant region; and wherein:
(1) a first polypeptide comprising the VH of the antigen binding domain that binds to CD33 linked to the first heavy chain constant region, a second polypeptide comprising the VL of the antigen binding domain that binds to CD33 linked to the light chain constant region linked to the one or more cytokine molecules, and a third polypeptide comprising the one or more immune cell engagers linked to the second heavy chain constant region;
(2) a first polypeptide comprising the VH of the antigen binding domain that binds to CD33 linked to the first heavy chain constant region, a second polypeptide comprising the VL of the antigen binding domain that binds to CD33 linked to the light chain constant region, and a third polypeptide comprising the one or more cytokine molecules linked to the one or more immune cell engagers linked to the second heavy chain constant region; or
(3) a first polypeptide comprising the VH of the antigen binding domain that binds to CD33 linked to the first heavy chain constant region, a second polypeptide comprising the VL of the antigen binding domain that binds to CD33 linked to a light chain constant region, and a third polypeptide comprising the one or more immune cell engagers linked to the second heavy chain constant region linked to the one or more cytokine molecules.

67. The multifunctional molecule of claim 64, wherein the multifunctional molecule comprises:
(1) a first polypeptide comprising a sequence having at least 80% sequence identity to the sequence of SEQ ID NO: 267, SEQ ID NO: 269, SEQ ID NO: 270, SEQ ID NO: 271, or SEQ ID NO: 272, and a second polypeptide comprising a sequence having at least 80% sequence identity to the sequence of SEQ ID NO: 273; or
(2) a first polypeptide, a second polypeptide, and a third polypeptide comprising sequences having at least 80% sequences identity to the sequences of:
(A) SEQ ID NO: 274, SEQ ID NO: 273, SEQ ID NO: 275, respectively;
(B) SEQ ID NO: 274, SEQ ID NO: 276, SEQ ID NO: 275, respectively;
(C) SEQ ID NO: 279, SEQ ID NO: 280, SEQ ID NO: 281, respectively;
(D) SEQ ID NO: 279, SEQ ID NO: 280, SEQ ID NO: 282, respectively; or
(E) SEQ ID NO: 279, SEQ ID NO: 280, SEQ ID NO: 283, respectively.

68. The multifunctional molecule of claim 64, wherein the multifunctional molecule comprises:
(1) a first polypeptide comprising the sequence of SEQ ID NO: 267, SEQ ID NO: 269, SEQ ID NO: 270, SEQ ID NO: 271, or SEQ ID NO: 272, and a second polypeptide comprising the sequence of SEQ ID NO: 273; or
(2) a first polypeptide, a second polypeptide, and a third polypeptide comprising the sequences of:
(A) SEQ ID NO: 274, SEQ ID NO: 273, SEQ ID NO: 275, respectively;
(B) SEQ ID NO: 274, SEQ ID NO: 276, SEQ ID NO: 275, respectively;
(C) SEQ ID NO: 279, SEQ ID NO: 280, SEQ ID NO: 281, respectively;
(D) SEQ ID NO: 279, SEQ ID NO: 280, SEQ ID NO: 282, respectively; or
(E) SEQ ID NO: 279, SEQ ID NO: 280, SEQ ID NO: 283, respectively.

69. The multifunctional molecule of claim 47, wherein the multifunctional molecule further comprises a second antigen binding domain that binds to CD33, and wherein:
(1) the second antigen binding domain that binds to CD33 is linked to the antigen binding domain that binds to CD33, the one or more immune cell engagers, or a combination thereof,
(2) the multifunctional molecule comprises the first polypeptide chain comprising the first heavy chain constant region and the second polypeptide chain comprising the second heavy chain constant region, and the second antigen binding domain that binds to CD33 is linked to: (A) the first heavy chain constant region or the second heavy chain constant region, (B) the antigen binding domain that binds to CD33, (C) the one or more immune cell engagers, (D) the one or more cytokine molecules, or (E) any combination thereof.

70. The multifunctional molecule of claim 47, wherein the multifunctional molecule further comprises a TGF-β inhibitor, a stromal modifying moiety, or a combination thereof.

71. A polynucleotide comprising a sequence encoding the multifunctional molecule of claim 47.

72. A pharmaceutical composition comprising the multifunctional molecule of claim 47, and a pharmaceutically acceptable carrier, excipient, or stabilizer.

73. A method of treating cancer comprising administering to a subject in need thereof the pharmaceutical composition of claim 72, wherein the multifunctional molecule is administered in an amount effective to treat the cancer in the subject.

74. The method of claim 73, wherein the subject has cancer cells that express CD33.

75. The method of claim 73, wherein:
(1) the cancer is a hematological cancer; or
(2) the cancer is a myeloid leukemia selected from the group consisting of acute myeloblastic leukemia, acute myelomonocytic leukemia, juvenile myelomonocytic leukemia, chronic myelomonocytic leukemia, acute basophilic leukemia, acute eosinophilic leukemia, chronic eosinophilic leukemia, acute biphenotypic leukaemia, acute megakaryoblastic leukemia, acute erythroid leukemia, acute panmyeloic leukemia, chronic neutrophilic leukemia, myeloid dendritic cell leukemia, accelerated phase chronic myelogenous leukemia, essential thrombocytosis, polycythemia vera, myelodysplastic syndrome, and myeloid sarcoma.

76. The method of claim 73, the method further comprises administering a second therapeutic treatment, wherein the second therapeutic treatment comprises a chemotherapeutic agent, a biologic agent, hormonal therapy, radiation, or surgery.
